(19) United States
(12) Patent Application Publication
(10) Pub. No.: US 2024/0390433 A1
(43) Pub. Date: Nov. 28, 2024

(54) GENETICALLY MODIFIED BACILLUS SUBTILIS STRAIN AND USE AS A LIVE DELIVERY AND PRODUCTION SYSTEM

(71) Applicant: BiomEdit, LLC, Fishers, IN (US)

(72) Inventors: Dharanesh Mahimapura Gangaiah, Fishers, IN (US); Arvind Kumar, Fishers, IN (US); Shrinivasrao Peerajirao Mane, Fishers, IN (US)

(21) Appl. No.: 18/693,585

(22) PCT Filed: Sep. 21, 2022
(86) PCT No.: PCT/US2022/044211

§ 371 Date: Mar. 20, 2024

Related U.S. Application Data
(60) Provisional application No. 63/247,271, filed on Sep. 22, 2021.
(60) Provisional application No. 63/247,273, filed on Sep. 22, 2021.
(60) Provisional application No. 63/247,400, filed on Sep. 23, 2021.

(51) Int. Cl. A61K 35/742; C07K 14/32; C12N 1/20; C12N 15/75; C12R 1/125

(52) U.S. Cl. CPC A61K 35/742; C07K 14/32; C12N 1/205; C12N 15/75; C12R 2001/125

(57) ABSTRACT

The present invention relates to genetically modified Bacillus subtilis, compositions, and uses thereof in production of biomolecules and heterologous proteins and for delivery of biomolecules and heterologous proteins in animals and associated methods for improving animal health.

### CROSS REFERENCE TO RELATED APPLICATIONS

[0001] The present application claims priority to U.S. Application Ser. No. 63/247,271, filed Sep. 22, 2021, U.S. Application Ser. No. 63/247,273, filed Sep. 22, 2021, and U.S. Application Ser. No. 63/247,400, filed Sep. 23, 2021, the entire contents of which are incorporated by reference herein.

### SEQUENCE LISTING

[0002] This application contains a Sequence Listing, which was submitted in XML format via EFS-Web, and is hereby incorporated by reference in its entirety. The XML copy, created on Sep. 21, 2022, is named “2950-12_ST26.xml” and is 12,483,777 bytes in size.

### FIELD OF THE INVENTION

[0003] The present invention relates to genetically modified Bacillus subtilis, compositions, and uses thereof in production and for delivery of biomolecules and heterologous proteins in animals and associated methods for improving animal health.

### BACKGROUND

[0004] Direct fed microbials (DFMs), often also called probiotics, are microorganisms which colonize the gastrointestinal tract of an animal and provide some beneficial effect to that animal. The microorganisms can be bacterial species, for example those from the genera Bacillus, Lactobacillus, Lactococcus, and Enterococcus. The microorganisms can be provided to an animal orally or mucosally or, in the case of birds, provided to a fertilized egg, i.e. in ovo. The beneficial activity provided by a DFM can be through the synthesis and secretion of vitamins or other nutritional molecules needed for a healthy metabolism of the host animal. A DFM can also protect the host animal from disease, disorders, or clinical symptoms caused by pathogenic microorganisms or other agents. For example, the DFM may naturally produce factors having inhibitory or cytotoxic activity against certain species of pathogens, such as deleterious or disease-causing bacteria. Probiotics and DFMs provide an attractive alternative or addition to the use and application of antibiotics in animals. Antibiotics can promote resistant or less sensitive bactaeria and can ultimately end up in feed products or foods consumed by other animals or humans. DFMs are characterized as being generally safe (even denoted Generally Regarded as Safe (GRAS) and most are not naturally resistant to antibiotics.

[0005] However, the DFM may not be able to produce such factors in sufficient quantity to reduce infection of the host with the pathogen, or the factors may affect only a limited set of pathogens, leaving the host vulnerable to other pathogens. Strains suitable as DFMs can provide an attractive and useful starting point for applications to produce or generate biomolecules and heterologous proteins, including as a live delivery system for synthesis and delivery of molecules or proteins with wide applications including in therapy and in animal health.

[0006] Recombinant protein production in microbial cells is an important aspect of the modern biotechnological industry. Intracellular expression of heterologous proteins in host cells is widely utilized and such proteins are isolated from a culture of producing host cells. Biomolecules or heterologous proteins can be expressed from plasmids transfected into bacterial cells or from encoding sequence(s) integrated in the host bacteria genome.

[0007] In addition, recent achievements in secretory expression of recombinant proteins have encouraged both the scientific and industrial communities to apply and implement bacteria with a secretory ability for protein production. Using secretory-type host cells, synthesized target biomolecules and proteins are secreted directly and accumulated in the extracellular medium, which provides cost-effective downstream purification processing. Further, this can permit production and isolation of target biomolecules and proteins without the need or requirement for lysing the host cells. Also, secretory expression of recombinant proteins prevents accumulation of target biomolecules heterologous proteins within host cells, which can limit cell growth and production, lead to cell toxicity and result in incorrect protein folding (Mergulhao, F. J.; Summers, D. K.; Monteiro, G. A. (2005) Biotechnol Adv 23(3):177-202; Song, Y.; Nikoloff, J. M.; Zhang, D. (2015) J Microbiol Biotechnol 25(7): 963-77).

[0008] Bacillus subtilis is a Gram-positive model bacterium which is widely used for industrial production of recombinant proteins such as alpha-amylase, protease, lipase, and other industrial enzymes. Because of the ability of the bacteria to produce large amounts of a target protein, and also to secrete large amounts of a target protein into the culture medium, and the availability of a low-cost downstream production and purification process, over 60% of commercial industrial enzymes are produced in Bacillus subtilis and relative Bacillus species (Schallmey, M.; Singh, A.; Ward, O. P. (2004) 50 (1): 1-17). In contrast to the frequently used recombinant protein expression host Escherichia coli, Bacillus subtilis has no risk of endotoxin contamination and has been certificated as a GRAS (generally regarded as safe) organism by the FDA, which makes it a choice for food-grade and pharmaceutical protein production.

[0009] Provided herein is a Bacillus subtilis expression system which is modified and engineered to produce biomolecules or heterologous proteins. In some instances, the modified Bacillus subtilis is capable of producing high levels of at least one or a multiplicity of biomolecules or heterologous proteins, including in instances as surface-displayed or secreted molecules. Otherwise, the modified Bacillus subtilis is capable of producing or delivering a therapeutic, biomolecule or heterologous protein upon introduction of the bacteria to a host animal. In thus instance, what is provided is a needed delivery system which can constantly deliver useful therapeutic molecules and biomolecules, such as anti-infective molecules, directly to the host, such as to the gastrointestinal tract where pathogenic bacteria are replicating in the host. The gastrointestinal system is also often a point of entry of the pathogen into the host. Preferably, the delivery system is a live genetically-modified microorganism, such as a bacterium, which can reproduce in—and even colonize in some instances—a host and directly deliver therapeutic molecules and biomolecules, such as antiinfective, antipathogenic or antibacterial agents to reduce the number of, or block the entry of, a pathogen.

[0010] There is a need in the art for bacterial strains, compositions and methods that provide improved production of beneficial molecules and/or delivery of beneficial molecules to the gastrointestinal tract of an animal and thus improve animal health. There is a need for an improved delivery platform and system, including suitable vectors and nucleic acid-based systems for rapid and effective expression of heterologous proteins or genes of interest and robust generation of numerous vehicles using a single platform. There is a need for strategies to provide intracellular and systemic delivery of therapeutic biomolecules, including antigens, antibodies, proteins and other therapeutic biomolecules.

[0011] The citation of references herein shall not be construed as an admission that such is prior art to the present invention.

### SUMMARY OF THE INVENTION

[0012] The invention provides compositions and methods for improving animal health and animal production and performance. The invention provides recombinantly manipulated and genetically modified Bacillus subtilis, compositions, and uses thereof in production and/or in direct delivery of biomolecules and heterologous proteins. The production or delivery of biomolecules and heterologous proteins provides materials, agents, compounds and associated methods for improving animal health.

[0013] The invention provides a Bacillus subtilis bacterial strain modified to facilitate expression and/or production and/or delivery of a biomolecule or heterologous protein of interest. In embodiments, the Bacillus subtilis bacterial strain is modified to introduce a strong or inducible promoter that drives expression and/or production of a natural or heterologous biomolecule or protein of interest. The strain may me modified to introduce a signal sequence that drives or facilitates secretion of the natural or heterologous biomolecule or protein of interest. In some embodiments, the Bacillus subtilis bacterial strain is modified to introduce nucleic acid encoding a heterologous protein or encoding one or more proteins required or utilized in the production of a heterologous protein. In embodiments, the nucleic acid introduced includes a strong or inducible promoter that drives expression and/or production of the heterologous protein of interest. In embodiments, the nucleic acid introduced includes a signal sequence that drives expression and secretion of the heterologous protein of interest.

[0014] The invention provides a production and delivery system which can constantly produce and deliver useful therapeutic molecules and biomolecules, such as anti-infective molecules, in a growth and production capacity and/or directly to the host, such as to the gastrointestinal tract where pathogenic bacteria are replicating in the host. The gastrointestinal system is also often a point of entry of the pathogen into the host. Preferably, the delivery system is a live genetically-modified microorganism, such as a bacterium, which can reproduce in—and even colonize in some instances—a host and directly deliver therapeutic molecules and biomolecules, such as antiinfective, antipathogenic, antibacterial, anti-inflammatory or immunomodulatory peptides, polypeptides, or agents to reduce the number of, or block the entry of, a pathogen. For example, in ovo delivery of a live delivery platform could prevent early colonization of an embryo by pathogens, possibly through competitive exclusion or direct or indirect anti-infective effects. In ovo delivery has the further advantage of bypassing any limitations of colonization by the genetically-modified microorganism due to maternal antibody interference. Preferably, the live bacterial delivery system synthesizes the anti-infective factor in sufficient quantity to have the desired effect on a pathogen. A targeted pathogen may be, without limitation, a bacterium of the genera Salmonella, Clostridium, Campylobacter, Staphylococcus, or Streptococcus, or an E. coli bacterium, or a parasite such as an Eimeria species. Preferably, the live bacterial system persists in the host gastrointestinal tract for a period of time. Preferably, the live bacterial delivery system produces a broad-spectrum anti-infective factor or multiple anti-infective factors, such that a variety of pathogens are targeted. Alternatively, a combination of live delivery systems could be administered to a single animal, with genetically-modified bacteria producing multiple anti-infective factors, immunomodulatory molecules, or growth-promoting biomolecules, or any combination thereof. Thus, more than one disease state is prevented or reduced, or diseases and syndromes having multiple causes can be effectively treated.

[0015] The present invention relates to an protein production and intracellular delivery platform which utilizes a genetically modified bacterium to produce or deliver preventative or therapeutic anti-infective activity, immunomodulatory factors, or growth-promoting biomolecules directly to the mucosa of an animal in need thereof.

[0016] The invention provides modified Bacillus bacteria, particularly modified Bacillus subtilis strain 105 (ELA191105), as a bacterial strain for production of one or more biomolecules and heterologous proteins. In an embodiment, the modified Bacillus bacteria, particularly modified Bacillus subtilis strain 105 (ELA191105), is a bacterial strain for production and secretion of one or more biomolecules and heterologous proteins.

[0017] In embodiments, the Bacillus subtilis strain 105 (ELA191105) is modified to include nucleic acid encoding one or more biomolecule or heterologous protein directly. In embodiments, the Bacillus subtilis strain 105 (ELA191105) is modified to include nucleic acid encoding a protein or proteins which facilitate, induce, enhance or otherwise result in production of one or more biomolecule or heterologous protein. In one such embodiment, the Bacillus subtilis strain 105 (ELA191105) is modified to include nucleic acid encoding one or more protein or enzyme or substrate in a production pathway, synthesis pathway, etc which results in the generation or production of a target biomolecule or heterologous protein.

[0018] In an embodiment, a live delivery platform comprising a genetically-modified Bacillus bacteria for production of one or more biomolecules and heterologous proteins in an animal is provided, wherein the modified Bacillus comprises Bacillus subtilis strain 105 (ELA191105) genetically modified to include nucleic acid encoding one or more biomolecule or heterologous protein which is produced and delivered upon administration of the modified Bacillus bacteria to the animal.

[0019] In an embodiment, the modified Bacillus comprises Bacillus subtilis strain 105 comprising the nucleic acid sequence set out in SEQ ID NO: 1 or a Bacillus strain having at least 95% identity, 97% identity, 98% identity, 99% identity in genomic sequence to SEQ ID NO: 1.

[0020] In an embodiment, the modified Bacillus comprises Bacillus subtilis strain corresponds to ATCC deposit PTA-126786 strain or a Bacillus strain having at least 95% identity, 97% identity, 98% identity, 99% identity in genomic sequence to the sequence of ELA191105 corresponding to ATCC deposit PTA-126786.

[0021] Bacillus subtilis strain 105, also denoted ELA191105 and also denoted Bs PTA-86, is an isolated Bacillus subtilis strain that has probiotic capability and characteristics. In an embodiment, Bacillus subtilis strain 105 corresponds to ATCC deposit PTA-126786. In embodiments, the B subtilis strain corresponds to ATCC deposit PTA-126786 strain or a Bacillus strain having at least 90% identity, 95% identity, 97% identity, 98% identity, 99% identity in genomic sequence to the sequence of ELA191105 corresponding to ATCC deposit PTA-126786.

[0022] In an embodiment, the B subtilis strain 105 comprises the nucleic acid sequence set out in SEQ ID NO: 1 or a Bacillus strain having at least 90% identity, 95% identity, 97% identity, 98% identity, 99% identity in genomic sequence to SEQ ID NO: 1. In an embodiment, the B subtilis strain 105 comprises the nucleic acid sequence set out in SEQ ID NO: 2, 3, 4, 5 and/or 6 or a Bacillus strain having at least 90% identity, 95% identity, 97% identity, 98% identity, 99% identity in genomic sequence to SEQ ID NO: 2, 3, 4, 5 and/or 6. In an embodiment, the B subtilis strain 105 comprises nucleic acid sequence set out in SEQ ID NO: 1, 2, 3, 4, 5 or 6 or a Bacillus strain having at least 90% identity, 95% identity, 97% identity, 98% identity, 99% identity in genomic sequence to SEQ ID NO: 1, 2, 3, 4 5 or 6. SEQ ID NO: 1 provides the whole genome nucleic acid sequence for ELA191105, deposited as PTA-126786.

[0023] The present invention relates to a Bacillus bacteria based production and live delivery system, wherein a genetically modified Bacillus subtilis, particularly a B. subtilis strain which is safe and has probiotic characteristics, is modified to encode and to produce one or more biomolecule or heterologous protein, or is modified to increase production or provide inducible production/expression of one or more biomolecule or heterologous protein. The biomolecule or protein of interest may be a homologous B subtilis protein or may be a heterologous protein. There may be one or more, two or more, three or more, or a complex or gene cassette encoded grouping of proteins or biomolecules. In an embodiment, the biomolecule or heterologous protein is a therapeutic agent. In an embodiment, the biomolecule or heterologous protein is a compound or agent or reagent important in a biological or chemical reaction. In an embodiment, the biomolecule or heterologous protein is an antigen or one or more antigens. In an embodiment, the biomolecule or heterologous protein is an antibody or a fragment thereof, such as a domain antibody or nanobody. In an embodiment, the biomolecule or heterologous protein is an anti-infective, anti-bacterial or anti-pathogen agent. In an embodiment, the biomolecule or heterologous protein is a lytic protein. In an embodiment, the biomolecule is a therapeutic biomolecule, particularly a molecule having preventative or therapeutic anti-infective activity, one or more immunomodulatory factor, or one or more growth-promoting biomolecule. Any of various and known or important biomolecule or protein may be expressed for by the system and modified strain 105 of the invention.

[0024] In an embodiment of the Bacillus bacteria based production and live delivery system, a genetically modified Bacillus subtilis is utilized to simultaneously produce one or more biomolecule or heterologous protein. In an embodiment, strain 105 is modified to produce a combination of biomolecules or heterologous proteins. In an embodiment, the combination may result in production of a molecule of interest. In embodiments, the combination may be for utilization as combined agents. In embodiments, the combination may be a set of antigens, such as for a vaccine or an immunogenic composition.

[0025] In an embodiment, strain 105 is modified to increase competence. In an embodiment, strain 105 is modified to increase its ability to take up and internalize extracellular nucleic acid or DNA. In an embodiment, strain 105 is modified to express, overexpress, or inducibly express the genes encoding comK and comS. In an embodiment, strain 105 is modified to express, overexpress, or inducibly express the competence comK and comS proteins. In an embodiment, strain 105 is modified inducibly express or overexpress the genes encoding comK and comS. In embodiments, overpress refers to expression of a gene or production of a protein which is greater, particularly significantly greater, than native expression of a gene or production of a protein. In embodiments, overpress refers to expression of a gene or production of a protein which is greater, particularly significantly greater, than the expression by an unmodified or wild type strain. In one embodiment, the promoter is a native promoter of strain 105. In an embodiment the promoter is a native inducible promoter of strain 105. In an embodiment, the promoter is a non-native promoter or a non-native inducible promoter. Exemplary and suitable promoters are provided herein. Alternative promoters are known or can be selected by one skilled in the art.

[0026] In an embodiment, nucleic acid encoding or facilitating production of a biomolecule or a homologous protein or heterologous protein is linked to a native strain 105 promoter. In an embodiment, nucleic acid encoding or facilitating production of a biomolecule or a homologous protein or heterologous protein is linked to one or more native strain 105 promoter. In an embodiment, nucleic acid encoding or facilitating production of a biomolecule or a homologous protein or heterologous protein is linked to at least two native strain 105 promoters in tandem. In some embodiments, these promoters facilitate expression and production in strain 105. Exemplary and suitable promoters are provided herein.

[0027] In an embodiment, strain 105 is modified to secrete or more effectively secrete a biomolecule, homologous protein or heterologous protein. In an embodiment, strain 105 is modified to include nucleic acid encoding or otherwise capable of producing a biomolecule, homologous protein or heterologous protein, wherein the nucleic acid includes a signal sequence. In one embodiment, the signal sequence is a native signal sequence of strain 105. In an embodiment, the signal sequence is a non-native signal sequence. Exemplary and suitable signal sequence are provided herein. Alternative signal sequences are known or can be selected by one skilled in the art. The signal sequence for secretion may be at least 20 amino acids, at least 25 amino acids, at least 30 amino acids, at least 35 amino acids, at least 40 amino acids, at least 44 amino acids, at least 50 amino acids, at least 55 amino acids, at least 60 amino acids, or at least 65 amino acids. The signal sequence for secretion may also be 20-65 amino acids, 20-60 amino acids; 20-55 amino acids; 20-50 amino acids, 20-45 amino acids, 20-40 amino acids, 20-35 amino acids, 20-30 amino acids, 25-65 amino acids, 25-60 amino acids; 25-55 amino acids; 25-50 amino acids, 25-45 amino acids, 25-40 amino acids, 25-35 amino acids, 25-30 amino acids, 30-65 amino acids, 30-60 amino acids; 30-55 amino acids; 30-50 amino acids, 30-45 amino acids, 30-40 amino acids, or 30-35 amino acids.

[0028] In an embodiment, strain 105 is modified to enhance maintenance metabolism and promote more effective growth and growth cycles. In an embodiment, strain 105 is modified to generate non-spore forming bacteria strain. In an embodiment, strain 105 is modified to delete or to otherwise inactivate one or more native sequence responsible for or contributing to spore formation. In an embodiment, one or more of the SpoA and/or SoIVB protein encoding genes are deleted or to otherwise inactivated.

[0029] In an embodiment, strain 105 is modified to block production of, delete or otherwise inactivate one or more native protease. In an embodiment, the protease is one or more extracellular prtease. In an embodiment, inactivation or deletion serves to stabilize or increase the half life of one or more excreted biomolecule, protein etc from the strain. In embodiments, one or more of native extracellular proteases NprE, AprE, Epr (Epr1 and Epr2), Bpr, Mpr, NprB, Vpr, and WprA from B. subtilis strain 105 are deleted or otherwise inactivated. In embodiments, one or more of native extracellular proteases NprE, AprE, NprB, Vpr, and WprA from B. subtilis strain 105 are deleted or otherwise inactivated. In an embodiment, one or more of native extracellular proteases NprE, AprE and Epr (Epr1 and Epr2) from B. subtilis strain 105 are deleted or otherwise inactivated. In an embodiment, native extracellular proteases NprE and Vpr from B. subtilis strain 105 are deleted or otherwise inactivated. In and embodiment, native extracellular proteases AprE, NprB and WprA from B. subtilis strain 105 are deleted or otherwise inactivated.

[0030] In an embodiment, strain 105 is modified to block production of, delete or otherwise inactivate one or more native lytic enzyme or antibacterial protein. Exemplary strain 105 native lytic enzymes and antibacterial proteins which can be deleted or otherwise inactivated are provided herein.

[0031] In embodiments, strain 105 is modified to comprise one or more the self-amplifying nucleic acid encoding one or more biomolecule or protein of interest. In some embodiments, the self-amplifying nucleic acid encodes a biomolecule having a therapeutic effect such as an antibody, an anti-infective peptide, an immunomodulatory protein, and an antigen.

[0032] The present invention provides an expression cassette within a genetically-modified strain 105 that includes a heterologous coding region encoding a desired biomolecule or heterologous protein. The desired biomolecule may be a biomolecule having anti-infective activity, a probiotic factor, an immunomodulatory factor, a growth-promoting biomolecule, etc. The biomolecule may have anti-infective activity active against a pathogenic bacterium or a parasite. The expression cassette may be a plasmid or a vector, including a vector for integration in the Bacillus strain genome. The expression cassette, plasmid, vector, may include promoter sequence(s), signal sequence, one or more biomolecule or protein encoding sequence, one or more selection sequence for selection or determination of the growth of the plasmid or vector, and/or for selection or determination of the integration of the plasmid or vector. Suitable promoters, signal sequences are provided herein or would be known and available to one skilled in the art.

[0033] The present invention provides a use of any genetically-modified B. subtilis disclosed herein in the manufacture of a medicament. The present invention provides a use of any genetically-modified B. subtilis disclosed herein in the preparation of a feed additive or a component of animal feed.

[0034] In an embodiment, the invention provides a probiotic and therapeutic composition comprising the genetically modified B subtilis strain, particularly genetically modified B. subtilis strain 105 as described and detailed herein. In an embodiment, the invention provides a probiotic and therapeutic composition comprising the genetically modified B subtilis strain, particularly genetically modified B. subtilis strain 105 as described and detailed herein and a carrier suitable for animal administration; wherein said composition results in the expression and production of one or more biomolecule or heterologous protein in said animal when an effective amount is administered to an animal, as compared to an animal not administered the composition.

[0035] Methods of treating or alleciation a condition, disorder, infection or disease in an animal are provided comprising administering to said animal a genetically modified B subtilis strain, particularly genetically modified B. subtilis strain 105 as described and detailed herein. In an embodiment, the strain is administered with a carrier suitable for animal administration. In an embodiment, the strain is administered orally as part of or a component in feed.

[0036] In an embodiment, the invention provides a feed additive comprising the genetically modified B subtilis strain, particularly genetically modified B. subtilis strain 105 as described and detailed herein.

[0037] The invention provides a method of manufacturing one or more biomolecule or protein of interest comprising:
[0038] (a) modifying B subtilis strain 105 to introduce one or more nucleic acid capable of encoding the one or more biomolecule or protein of interest,
[0039] (b) culturing the modified strain 105, and
[0040] (c) isolating the one or more biomolecule or protein of interest.

[0041] In an embodiment, the B. subtilis strain 105 is modified before step a to improve or otherwise increase the expression and/or production of a biomolecule of interest. In an embodiment, the B. subtilis strain 105 is modified before step a by altering its competence, deleting or inactivating one or more gene such as one or more native protease, lytic enzyme, or deleting or inactivating one or more gene or protein responsible for spore formation.

[0042] The invention relates to and provides modified Bacillus bacteria for production or live delivery of one or more biomolecule or heterologous protein, wherein the bacteria comprises Bacillus subtilis strain 105 (ELA191105) genetically modified in one or more aspect selected from the following:
[0043] (a) genetically modified to increase competency;
[0044] (b) genetically modified to reduce or block spore formation;
[0045] (c) genetically modified to delete or inactivate one or more native protease; and
[0046] (d) genetically modified to include nucleic acid encoding one or more biomolecule or heterologous protein.

[0047] In an embodiment of the modified Bacillus bacteria, the Bacillus subtilis strain 105 comprises the nucleic acid sequence set out in SEQ ID NO: 1 or comprises at least 95% identity, 97% identity, 98% identity, 99% identity in genomic sequence to SEQ ID NO: 1.

[0048] In an embodiment of the modified Bacillus bacteria, the Bacillus subtilis strain corresponds to ATCC deposit PTA-126786 strain or has at least 95% identity, 97% identity, 98% identity, 99% identity in genomic sequence to the sequence of ELA 191105 corresponding to ATCC deposit FTA-126786.

[0049] In an embodiment of the modified Bacillus bacteria, the B subtilis strain 105 comprises the nucleic acid sequence set out in SEQ ID NO: 1, 2, 3, 4, 5 or 6 or comprises nucleic acid that has at least 90% identity, 95% identity, 97% identity, 98% identity, 99% identity in genomic sequence to SEQ ID NO: 1, 2, 3, 4 5 or 6.

[0050] Embodiments are provided wherein in (a) the bacteria is modified to overexpress comK, comS, or comK and comS to increase competency. In an embodiment, a gene cassette encoding comK and comS is integrated in the B subtilis genome.

[0051] In an embodiment, competency is increased and transformation efficiency of the strain is increased by at least 20 fold, by 50 fold, by 50 fold or greater, by 60 fold, by 80 fold, by 80 fold or greater, by 90 fold, by 100 fold or by 100 fold or greater. In one embodiment, competency is increased and transformation efficiency of the strain is increased by about 80 fold, by 80 fold or greater, by 90 fold, by 100 fold. In an embodiment, competency is increased and transformation efficiency of the strain is increased by approximately 100 fold.

[0052] Embodiments are provided wherein in (b) the bacteria is modified to delete or inactivate one or more native gene encoding SpoOA, SpoIVB or SpoA and SpoIVB.

[0053] Embodiments are provided wherein in (c) the bacteria is modified to delete or inactivate one or more native protease or the gene encoding one or more native protease selected from NprE, AprE, Epr1, Epr2, Bpr, Mpr, NprB, Vpr, and WprA. In an embodiment, the bacteria is modified to delete or inactivate the gene encoding native proteases NprE and Vpr. In an embodiment, the bacteria is modified to delete or inactivate the gene encoding native proteases AprE, NprB and WprA.

[0054] In other aspects, the modified Bacillus bacteria, particularlu B subtilis strain 105, is further genetically modified to delete or inactivate one or more native lytic enzyme or antibacterial peptide. In an embodiment, one or more native lytic enzyme or antibacterial peptide selected from xpf, lytC1, lytC2 and sdpC are deleted or inactivated.

[0055] In other aspects, the modified Bacillus bacteria, particularlu B subtilis strain 105, is further genetically modified to delete or inactivate one or more native gene encoding a virulence factor, toxin or antibacterial resistance (AMR). In embodiments, the one or more virulence factor, toxin or antibacterial resistance (AMR) is selected from macrolide 2′phosphotransferase (mphK), ABC—F type ribosomal protection protein (vmlR), Streptothricin-N-acetyltransferase (satA), tetracyclin efflux protein (tet(L)), aminoglycoside 6-adenylyltransferase (aadK) (29), and rifamycin-inactivating phosphotransferase (rphC), as set out in Table 16.

[0056] In some embodiments, the modified Bacillus comprises a B. subtilis isolate having at least at least one gene knockout selected from the following genes: spoOA, spoIIIE, spoIVB, NprE, AprE, NprB, Vpr, WprA; and one or more heterologous gene encoding one or more biomolecule or heterologous protein operatively linked to one or more promoter selected from a tuf promoter, sigx promoter, gros promoter, ftsh promoter, a PxylA promoter, a mannose inducible promoter, and a Physpank promoter.

[0057] In some embodiments, the modified Bacillus comprises a B. subtilis strain 105 isolate modified to overexpress comK, comS or comK and comS to increase competency; having at least at least one gene knockout selected from the following genes: spoOA, spoIIIE, spoIVB, NprE, AprE, NprB, Vpr, WprA; and modified to comprise one or more heterologous gene encoding one or more biomolecule or heterologous protein operatively linked to one or more promoter selected from a tuf promoter, sigx promoter, gros promoter, ftsh promoter, a PxylA promoter, a mannose inducible promoter, and a Physpank promoter. In an embodiment, the one or more promoter is selected from SEQ ID NO: 66, SEQ ID NO: 67, SEQ ID NO: 68, SEQ ID NO: 69, SEQ ID NO: 40 and SEQ ID NO: 41.

[0058] In other aspects, the one or more heterologous gene encoding one or more biomolecule or heterologous protein is integrated in the host B subtilis strain 105 genome. In some embodiments, the one or more heterologous gene encoding one or more biomolecule or heterologous protein is integrated in the host B subtilis strain 105 genome at one or more gene locations selected from amyE, NprE, AprE, Epr1, Epr2, Bpr, Mpr, NprB, Vpr, and WprA.

[0059] In additional embodiments, the one or more biomolecule or heterologous protein is selected from an anti-infective agent, anti-bacterial agent, anti-pathogen agent, immunomodulatory factor or agent, antigen, antibody, growth-promoting biomolecule, a probiotic, and a bio-based chemical.

[0060] In an aspect thereof, the one or more biomolecule or heterologous protein is an anti-bacterial agent. In a further such aspect, the one or more anti-bacterial agent is one or more lysin or lytic peptide. In another aspect, the one or more lysin or lytic peptide is PIyCM, CP025C, lysostaphin or a native B. subtilis 105 lytic enzyme.

[0061] In some embodiments, the one or more anti-bacterial agent is one or more antimicrobial peptide (AMP). In an embodiment, the one or more antimicrobial peptide (AMP) is a mersacidin or a cathelicidin peptide. In an embodiment, the one or more antimicrobial peptide (AMP) is a CAP18 peptide. In embodiments thereof, the CAP 18 peptide may be rabbit CAP18 or human Cap18 LL37 or a CAP18 peptide from another animal, or variant thereof. In embodiments thereof, the CAP 18 peptide may be SEQ ID NO: 95 or SEQ ID NO: 96, or variant thereof.

[0062] In some embodiments, the one or more biomolecule or heterologous protein is one or more antibody or a fragment thereof. In an embodiment, the one or more antibody or fragment thereof is one or more single chain antibody, domain antibody, VHH antibody or nanobody. In other embodiments, the one or more single chain antibody, domain antibody, VHH antibody or nanobody one or more single chain antibody, domain antibody, VHH antibody or nanobody directed against a pathogenic bacteria.

[0063] In another embodiment, the one or more antibody is one or more VHH antibody or nanobody directed against Clostridium perfringens. In an embodiment, the one or more antibody is one or more VHH antibody or nanobody directed against Clostridium perfringens alpha toxin and NetB. In some embodiments, the one or more VHH antibody is selected from SEQ ID NO: 97, SEQ ID NO: 98, SEQ ID NO: 101 and SEQ ID NO: 102.

[0064] In other aspects, the one or more biomolecule or heterologous protein is one or more antigen and wherein said antigen is capable of stimulating an immune response against a parasite, bacteria, or virus. In an aspect, the one or more biomolecule or heterologous protein is one or more antigen capable of stimulating an immune response against an Eimeria parasite. In an aspect, the one or more antigen is selected from Eimeria tenella elongation factor-1α, EtAMA1, EtAMA2, Eimeria tenella 5401, Eimeria acervuline lactate dehydrogenase antigen gene, Eimeria maxima surface antigen gene, Glyceraldehyde 3-phosphate Dehydrogenase (GAPDH) and Eimeria common antigen 14-3-3. In a particular aspect, the one or more antigen is an Eimeria antigen encoded by one or more of SEQ ID NO: 105, SEQ ID NO: 106, SEQ ID NO: 107, SEQ ID NO: 108, or SEQ ID NO: 109.

[0065] In other embodiments, the one or more heterologous gene encoding one or more biomolecule or heterologous protein is provided on a biosynthetic gene cluster (BGC) and wherein the BGC or a portion thereof is integrated in the host B subtilis strain 105 genome.

[0066] In an embodiment, the biosynthetic gene cluster (BGC) is a PKS BGC or a mersacidin BGC. In one embodiment, the PKS BGC is capable of producing an AhR-activating metabolite. In another embodiment, the mersacidin BGC is capable of producing one or more mersacidin polypeptide SEQ ID NO: 22 or SEQ ID NO: 23 capable of inhibiting or killing one or more bacteria or virus.

[0067] In some embodiments, the PKS BGC comprises the nucleic acid set out in SEQ ID NO: 110 or comprises nucleic acid encoding one or more polypeptide selected from SEQ ID NOs: 7-21. In some embodiments, the mersacidin BGC comprises the nucleic acid set out in SEQ ID NO: 24 or comprises nucleic acid encoding one or more polypeptide selected from SEQ ID NOs: 25-32.

[0068] In other aspects, the one or more biomolecule or heterologous protein is a bio-based chemical. Chemicals or agents which are bio-based and are synthesized or capable of being synthesized by an animal, bacteria or fungi host cell are well known to one skilled in the art. These may include enzymes or intermediates in enzymatic reactions. These may include additives for stabilization of other agents. These may include molecules or proteins useful in the food, cosmetic or pharmaceutical industry.

[0069] In one embodiment, the bio-based chemical is gamma polyglutamic acid (γ-PGA). In an embodiment, the γ-PGA is encoded by the CapABC locus and the B subtilis strain 105 is modified to produce increased amounts of γ-PGA by integrating at least one additional copy of the CapABC locus in B subtilis strain 105 genome. In one such embodiment, at least one additional copy of the CapABC locus is integrated in B subtilis strain 105 genome at one or more gene locus selected from amyE, nprE, apr and wprA.

[0070] In some embodiments of the invention, the one or more heterologous gene encoding one or more biomolecule or heterologous protein includes a native B subtilis 105 strain or other bacterial strain signal sequence for secretion of the one or more biomolecule or heterologous protein by the modified bacteria.

[0071] In embodiments, the native B subtilis 105 strain or other bacterial strain signal sequence for secretion is selected from SEQ ID NO: 43, SEQ ID NO: 44, SEQ ID NO: 46, SEQ ID NO: 47, SEQ ID NO: 49, and SEQ ID NOs: 50-64.

[0072] In another aspect, a live delivery platform is provided herein comprising a genetically-modified Bacillus bacteria for production of one or more biomolecules or heterologous proteins in an animal, wherein the modified Bacillus comprises Bacillus subtilis strain 105 (ELA191105) genetically modified to include nucleic acid encoding one or more biomolecule or heterologous protein which is produced and delivered upon administration of the modified Bacillus bacteria to the animal.

[0073] In some aspects, the bacteria comprises Bacillus subtilis strain 105 (ELA191105) genetically modified in one or more aspect selected from the following:
[0074] (a) genetically modified to increase competency;
[0075] (b) genetically modified to reduce or block spore formation;
[0076] (c) genetically modified to delete or inactivate one or more native protease; and
[0077] (d) genetically modified to include nucleic acid encoding one or more biomolecule or heterologous protein.

[0078] In an aspect, the Bacillus subtilis strain 105 comprises the nucleic acid sequence set out in SEQ ID NO: 1 or comprises at least 95% identity, 97% identity, 98% identity, 99% identity in genomic sequence to SEQ ID NO: 1.

[0079] In an aspect, the Bacillus subtilis strain corresponds to ATCC deposit PTA-126786 strain or has at least 95% identity, 97% identity, 98% identity, 99% identity in genomic sequence to the sequence of ELA191105 corresponding to ATCC deposit PTA-126786.

[0080] In other aspects, the Bacillus subtilis bacteria is genetically modified to include nucleic acid encoding one or more biomolecule or heterologous protein and comprises an expression cassette;
[0081] wherein the expression cassette comprises one or more of:
[0082] a promoter for transcriptional expression,
[0083] a nucleic acid sequence encoding a signal sequence for secretion,
[0084] at least one heterologous coding region encoding a desired biomolecule or heterologous protein, and
[0085] terminators for translation and transcription termination.

[0086] In some embodiments, the promoter for transcriptional expression is one or more promoter selected from a tuf promoter, sigx promoter, gros promoter, ftsh promoter, a PxylA promoter, a mannose inducible promoter, and a Physpank promoter. In embodiments, the one or more promoter is selected from SEQ ID NO: 66, SEQ ID NO: 67, SEQ ID NO: 68, SEQ ID NO: 69, SEQ ID NO: 40 and SEQ ID NO: 41.

[0087] In embodiments, the nucleic acid sequence encoding a signal sequence for secretion encodes at least 20 amino acids, at least 25 amino acids, at least 30 amino acids, at least 35 amino acids, at least 40 amino acids, at least 44 amino acids, at least 50 amino acids, at least 55 amino acids, at least 60 amino acids, or at least 65 amino acids.

[0088] In some embodiments, the nucleic acid sequence encoding a signal sequence for secretion encodes a native B subtilis 105 strain or other bacterial strain signal sequence for secretion comprising a sequence selected from SEQ ID NO: 43, SEQ ID NO: 44, SEQ ID NO: 46, SEQ ID NO: 47, SEQ ID NO: 49, and SEQ ID NOs: 50-64.

[0089] In some embodiments, the expression cassette or the at least one heterologous coding region encoding a desired biomolecule or heterologous protein is integrated in the host B subtilis strain 105 genome.

[0090] In embodiments, the expression cassette or the at least one heterologous coding region encoding a desired biomolecule or heterologous protein is integrated in the host B subtilis strain 105 genome at one or more gene locations selected from amyE, NprE, AprE, Epr1, Epr2, Bpr, Mpr, NprB, Vpr, and WprA.

[0091] In certain embodiments, the desired biomolecule or heterologous protein is selected from an anti-infective agent, anti-bacterial agent, anti-pathogen agent, immunomodulatory factor or agent, antigen, antibody, growth-promoting biomolecule, a probiotic, and a bio-based chemical.

[0092] The invention further relates to a method of reducing colonization of an animal by a pathogenic bacterium, parasite or virus, the method comprising treating an animal with the modified Bacillus bacteria provided herein or with the live delivery platform provided herein.

[0093] In embodiments thereof, the animal is a bird, a human, or a non-human mammal.

[0094] In embodiments thereof, the pathogenic bacterium is selected from the group consisting of Salmonella, Clostridium, Campylobacter, Staphylococcus, Streptococcus, and an E. coli bacterium.

[0095] In embodiments, the pathogenic parasite is Eimeria.

[0096] In embodiments, the modified Bacillus bacteria or the live delivery platform is administered orally, parentally, nasally, or mucosally.

[0097] In some embodiments, the animal is a bird and wherein treatment is administered in ovo.

[0098] In aspects hereof a modified Bacillus bacteria and a live delivery platform are provided for use in therapy. In aspects, the modified Bacillus bacteria and alive delivery platform are provided for use in reducing colonization of an animal by a pathogenic bacterium, parasite or virus.

[0099] In other aspects, the modified Bacillus bacteria and alive delivery platform are provided for use in the manufacture of a medicament for reducing colonization of an animal by a pathogenic bacterium, parasite or virus. In other aspects, the modified Bacillus bacteria and alive delivery platform are provided for use in the manufacture of a medicament for stimulating an immune response in an animal against a pathogenic bacterium, parasite or virus. In other aspects, the modified Bacillus bacteria and alive delivery platform are provided for use in the manufacture of a medicament for passive immunization in an animal against a pathogenic bacterium, parasite or virus.

[0100] While there have been described what are presently believed to be the preferred embodiments of the present invention, those skilled in the art will realize that other and further changes and modifications may be made thereto without departing from the spirit of the invention, and it is intended to claim all such modifications and changes as come within the true scope of the invention.

[0101] Other objects and advantages will become apparent to those skilled in the art from a review of the ensuing detailed description, which proceeds with reference to the following illustrative drawings, and the attendant claims.

### BRIEF DESCRIPTION OF THE DRAWINGS

[0102] FIG. 1 depicts the SpoOA and SpoIVB locus from B. subtilis strain 105 wherein SpoIVb and SpoA are encoded by tandem located sequence.

[0103] FIG. 2 provides the gene maps for each of amyE, nprE, apr and wprA on the B. subtilis strain 105 genome.

[0104] FIGS. 3A and B. A depicts the pathway for poly-γ-glutamate biosynthesis. The B. subtilis strain 105 native locus for producing PGA is shown in B. The native B. subtilis locus comprises capC, capB and capA encoded from a single promoter.

[0105] FIG. 4 depicts engineering and design of the comKS cassette for integration and expression.

[0106] FIG. 5 depicts engineering of the PKS biosynthetic gene cluster (BGC) into B subtilis 105.

[0107] FIG. 6 depicts the Bacillus BGC expression vector with left and right amyE arms for homologous integration into Bacillus subtilis 105. Genes depicted on the left side of the vector circle are elements needed for single copy replication in E. coli. The lacI and kan genes are elements needed for homologous recombination into Bacillus genome, selection and expression. A PxylA and a Physpank promoter element are also depicted.

[0108] FIG. 7 depicts engineering of the Mersacidin biosynthetic gene cluster (BGC) into B subtilis 105. (A) provides the Mersacidin cluster including the lagD coding sequence (LagD CDS). (B) provides the Mersacidin cluster without the lagD coding sequence.

### DETAILED DESCRIPTION

[0109] In accordance with the present invention there may be employed conventional molecular biology, microbiology, and recombinant DNA techniques within the skill of the art. Such techniques are explained fully in the literature.

[0110] As used herein, “isolated” means that the subject isolate has been separated from at least one of the materials with which it is associated in a particular environment, for example, its natural environment.

[0111] Thus, an “isolate” does not exist in its naturally occurring environment; rather, it is through the various techniques known in the art that the microbe has been removed from its natural setting and placed into a non-naturally occurring state of existence. Thus, the isolated strain or isolated microbe may exist as, for example, a biologically pure culture in association with an acceptable carrier.

[0112] As used herein, “individual isolates” should be taken to mean a composition, or culture, comprising a predominance of a single species, or strain, of microorganism, following separation from one or more other microorganisms. The phrase should not be taken to indicate the extent to which the microorganism has been isolated or purified. However, “individual isolates” can include substantially only one species, or strain, of microorganism.

[0113] In certain aspects of the disclosure, the isolated Bacillus strain exists as isolated and biologically pure cultures. It will be appreciated by one of skill in the art, that an isolated and biologically pure culture of a particular Bacillus strain, denotes that said culture is substantially free (within scientific reason) of other living organisms and contains only the individual Bacillus strain in question. The culture can contain varying concentrations of said isolated Bacillus strain. The present disclosure notes that isolated and biologically pure microbes often necessarily differ from less pure or impure materials.

[0114] As used herein, “spore” or “spores” refer to structures produced by bacteria that are adapted for survival and dispersal. Spores are generally characterized as dormant structures; however, spores are capable of differentiation through the process of germination. Germination is the differentiation of spores into vegetative cells that are capable of metabolic activity, growth, and reproduction. The germination of a single spore results in a single bacterial vegetative cell. Bacterial spores are structures for surviving conditions that may ordinarily be nonconductive to the survival or growth of vegetative cells.

[0115] As used herein, the terms “colonize” and “colonization” include “temporarily colonize” and “temporary colonization”.

[0116] As used herein, “microbiome” refers to the collection of microorganisms that inhabit the gastrointestinal tract of an animal and the microorganisms' physical environment (i.e., the microbiome has a biotic and physical component). The microbiome is fluid and may be modulated by numerous naturally occurring and artificial conditions (e.g., change in diet, disease, antimicrobial agents, influx of additional microorganisms, etc.). The modulation of the gastrointestinal microbiome can be achieved via administration of the compositions of the disclosure can take the form of: (a) increasing or decreasing a particular Family, Genus, Species, or functional grouping of a microbe (i.e., alteration of the biotic component of the gastrointestinal microbiome) and/or (b) increasing or decreasing gastrointestinal pH, increasing or decreasing volatile fatty acids in the gastrointestinal tract, increasing or decreasing any other physical parameter important for gastrointestinal health (i.e., alteration of the abiotic component of the gut microbiome).

[0117] As used herein, “probiotic” refers to a substantially pure microbe (i.e., a single isolate) or a mixture of desired microbes, and may also include any additional components (e.g., carrier) that can be administered to an animal to provide a beneficial health effect. Probiotics or microbial compositions of the invention may be administered with an agent or carrier to allow the microbes to survive the environment of the gastrointestinal tract, i.e., to resist low pH and to grow in the gastrointestinal environment.

[0118] The term “growth medium” as used herein, is any medium which is suitable to support growth of a microbe. By way of example, the media may be natural or artificial including gastrin supplemental agar, minimal media, rich media, LB media, blood serum, and tissue culture gels. It should be appreciated that the media may be used alone or in combination with one or more other media. It may also be used with or without the addition of exogenous nutrients.

[0119] As used herein, “improved” should be taken broadly to encompass improvement of a characteristic of interest, as compared to a control group, or as compared to a known average quantity associated with the characteristic in question. In the present disclosure, “improved” does not necessarily demand that the data be statistically significant (i.e. p<0.05); rather, any quantifiable difference demonstrating that one value (e.g. the average treatment value) is different from another (e.g. the average control value) can rise to the level of “improved.”

[0120] As used herein, the term “metabolite” refers to an intermediate or product of metabolism. In some embodiments, a metabolite includes a small molecule. Metabolites have various functions, including in fuel, structural, signaling, stimulatory and inhibitory effects on enzymes, as a cofactor to an enzyme, in defense, and in interactions with other organisms (such as pigments, odorants and pheromones). A primary metabolite is directly involved in normal growth, development and reproduction. A secondary metabolite is not directly involved in these processes but usually has an important ecological function. Examples of metabolites include but are not limited to antibiotics and pigments such as resins and terpenes, etc. Metabolites, as used herein, include small, hydrophilic carbohydrates; large, hydrophobic lipids and complex natural compounds.

[0121] As used herein, “carrier”, “acceptable carrier”, or “pharmaceutical carrier” are used interchangeably and refer to a diluent, adjuvant, excipient, or vehicle with which the compound is administered. Such carriers can be sterile liquids, such as water and oils, including those of petroleum, animal, vegetable, or synthetic origin; such as peanut oil, soybean oil, mineral oil, sesame oil, and the like. Water or aqueous solution saline solutions and aqueous dextrose and glycerol solutions are preferably employed as carriers, in some embodiments as injectable solutions. Alternatively, the carrier can be a solid dosage form carrier, including but not limited to one or more of a binder (for compressed pills), a glidant, an encapsulating agent, a flavorant, and a colorant. The choice of carrier can be selected with regard to the intended route of administration and standard pharmaceutical practice. See Handbook of Pharmaceutical Excipients, (Sheskey, Cook, and Cable) 2017, 8th edition, Pharmaceutical Press; Remington's Pharmaceutical Sciences, (Remington and Gennaro) 1990, 18th edition, Mack Publishing Company; Development and Formulation of Veterinary Dosage Forms (Hardee and Baggot), 1998, 2nd edition, CRC Press.

[0122] As used herein, “delivery” or “administration” means the act of providing a beneficial activity to a host. The delivery may be direct or indirect. An administration could be by an oral, nasal, or mucosal route. For example without limitation, an oral route may be an administration through drinking water, a nasal route of administration may be through a spray or vapor, and a mucosal route of administration may be through direct contact with mucosal tissue. Mucosal tissue is a membrane rich in mucous glands such as those that line the inside surface of the nose, mouth, esophagus, trachea, lungs, stomach, gut, intestines, and anus. In the case of birds, administration may be in ovo, i.e. administration to a fertilized egg. In ovo administration can be via a liquid which is sprayed onto the egg shell surface, or an injected through the shell.

[0123] As used herein, “animal” includes bird, poultry, a human, or a non-human mammal. Specific examples include chickens, turkey, dogs, cats, cattle, salmon, fish, swine and horse. The chicken may be a broiler chicken, egg-laying, or egg-producing chicken. As used herein, the term “poultry” includes domestic fowl, such as chickens, turkeys, ducks, and geese.

[0124] As used herein, “gut” refers to the gastrointestinal tract including stomach, small intestine, and large intestine. The term “gut” may be used interchangeably with “gastrointestinal tract”.

[0125] As used herein, a “genetically-modified microorganism” means any microorganism which has been altered from the natural state using molecular biological techniques. A genetic modification could be the deletion of a portion of the bacterial chromosome or a naturally-occurring plasmid. The genetic modification could also be the introduction of an artificial or exogenous nucleic acid into a portion of the chromosome. The introduction may or may not disturb or perturb the expression of a bacterial gene. The genetic modification could also be the introduction of an artificial plasmid. The genetically-modified microorganism may be a bacterium, a virus, a yeast, a mold, or a single-celled organism.

[0126] An “artificial nucleic acid” or “artificial plasmid” is any nucleic acid or plasmid which does not occur naturally, but rather has been constructed using molecular biological techniques. Portions of the nucleic acid or plasmid may occur naturally, but the those portions are in an artificial relationship or organization.

[0127] As used herein, an “expression cassette” is an artificial nucleic acid constructed to result in the expression of a desired biomolecule by the genetically-modified microorganism. An expression cassette comprises one or more of a promoter for transcriptional expression, a nucleic acid sequence encoding a signal sequence for secretion, a nucleic acid sequence encoding a cell-wall anchor, at least one heterologous coding region encoding a desired biomolecule, a nucleic acid sequence encoding an expressed peptide tag for detection, and terminators for translation and transcription termination. A promoter directs the initiation of transcription of the coding regions into a messenger RNA and the translation of the mRNA into a peptide. A signal sequence for secretion, or a secretion signal sequence, directs the peptide to be located outside the cell membrane. The extracellular peptide could be a soluble, secreted protein or it may be cell-associated, particularly if the expression cassette contains a cell wall anchor sequence which attaches the extracellular peptide to a bacterial cell wall. An expressed peptide tag is any amino acid sequence which may be recognized by an antibody or other binding protein. The expressed peptide tag may also bind an inorganic substance, such as a six-histidine tag which binds to nickel molecules. Terminators for translation may be a stop codon or a spacer open reading frame containing a stop codon.

[0128] As used herein, a “heterologous coding region” is a nucleic acid sequence containing an open reading frame which encodes a peptide. The coding region is heterologous to the associated promoter, meaning the coding region and the promoter are not associated in their natural states.

[0129] A “heterologous” region of a nucleic acid, RNA or DNA, construct is an identifiable segment of RNA or DNA within a larger RNA or DNA molecule that is not found in association with the larger molecule in nature. Thus, when the heterologous region encodes a gene, the gene will usually be flanked by RNA or DNA that does not flank the genomic RNA or DNA in the genome of the source organism.

[0130] As used herein, a “protein” is a sequence of amino acids which assumes a three-dimensional structure. A “peptide” can be used interchangeably with protein, but may also be a short linear sequence of amino acids without a defined three-dimensional structure.

[0131] As used herein, a “desired biomolecule” is any molecule or peptide which may be advantageous to a host when administered via a live delivery platform. The desired biomolecule may be a peptide with anti-infective activity, a probiotic factor, an immunomodulatory factor, an anti-antinutritional factor, or a growth-promoting biomolecule. The desired biomolecule may also be an enzyme which produces a substance with anti-infective activity or a probiotic factor such as a vitamin.

[0132] As used herein, “anti-infective activity” includes any activity which prevents infection of a host with a pathogenic organism. The following molecules are examples of biomolecules possessing anti-infective activity: an antibacterial peptide; a lysin or lytic enzyme; a prophage, phage or virus; an enzyme, for example one that cleaves or disables a protein made by a pathogen; and an antibody which blocks, inhibits, or clears a pathogenic molecule. An anti-infective may have bactiostatic activity, which slows, reduces, or prevents the growth of a pathogenic species. A non-limiting example of an antibacterial peptide is a member of the mersacidin family or a mersacidin-like molecule, such as those described in EP0700998. A non-limiting example of lysins are lytic molecules produced by phage. Lysins may have specificity for certain pathogenic species of bacteria and have been suggested for use in substitution for traditional antibiotics. V. A. Fischetti, Viruses, vol. 10, no. 310 (2018); and R. Vazquez et al. Frontiers in Immunology, vol. 9, article 2252 (2018).

[0133] As used herein, a “probiotic factor” is a substance which, when produced by a genetically-modified microorganism, proves beneficial to a host. The probiotic factor may be an attachment molecule or an agglutinizing molecule which promotes colonization of the host with the genetically-modified microorganism and/or prolongs the period of time where the genetically-modified microorganism colonizes the host. The longer the genetically-modified microorganism persists in the host the longer the beneficial effect is provided.

[0134] As used herein, an “immunomodulatory factor” could be a cytokine, lymphokine, chemokine, interleukin, interferon, a colony stimulating factor, or a growth factor. The immunomodulatory factor could provide nonspecific enhancement of an immune response or the immunomodulatory factor could increase the number or tissue distribution of immune cells present in the host. The immunomodulatory factor may also reduce an inappropriate immune response, such as without limitation an autoimmune response.

[0135] As used herein, a “growth-promoting biomolecule” could be a growth factor, a transfer factor (such as an iron-chelating molecule), a hormone, or any other factor which promotes healthy metabolic activity.

[0136] As used herein, an “anti-nutritional factor” could include protease inhibitors for example, a trypsin inhibitors.

[0137] As used herein, “delivery” or “administration” means the act of providing a beneficial activity to a host. The delivery may be direct or indirect. An administration could be by an oral, nasal, or mucosal route. For example without limitation, an oral route may be an administration through drinking water, a nasal route of administration may be through a spray or vapor, and a mucosal route of administration may be through direct contact with mucosal tissue. Mucosal tissue is a membrane rich in mucous glands such as those that line the inside surface of the nose, mouth, esophagus, trachea, lungs, stomach, gut, intestines, and anus. In the case of birds, administration may be in ovo, i.e. administration to a fertilized egg. In ovo administration can be via a liquid which is sprayed onto the egg shell surface, or an injected through the shell.

[0138] As used herein, the terms “treating”, “to treat”, or “treatment”, include restraining, slowing, stopping, reducing, ameliorating, or reversing the progression or severity of an existing symptom, disorder, condition, or disease. A treatment may also be applied prophylactically to prevent or reduce the incidence, occurrence, risk, or severity of a clinical symptom, disorder, condition, or disease.

[0139] As used herein, “subject” includes bird, poultry, fish, a human, or a non-human animal. Specific examples include chickens, turkey, dogs, cats, cattle, and swine. The chicken may be a broiler chicken, egg-laying or egg-producing chicken. As used herein, the term “poultry” includes domestic fowl, such as chickens, turkeys, ducks, quail, and geese.

[0140] A “heterologous” region of a nucleic acid, RNA or DNA, construct is an identifiable segment of RNA or DNA within a larger RNA or DNA molecule that is not found in association with the larger molecule in nature. Thus, when the heterologous region encodes a gene, the gene will usually be flanked by RNA or DNA that does not flank the genomic RNA or DNA in the genome of the source organism.

[0141] The term “primer” as used herein refers to an oligonucleotide, whether occurring naturally as in a purified restriction digest or produced synthetically, which is capable of acting as a point of initiation of synthesis when placed under conditions in which synthesis of a primer extension product, which is complementary to a nucleic acid strand, is induced, i.e., in the presence of nucleotides and an inducing agent such as a DNA polymerase and at a suitable temperature and pH. The primer may be either single-stranded or double-stranded and must be sufficiently long to prime the synthesis of the desired extension product in the presence of the inducing agent. The exact length of the primer will depend upon many factors, including temperature, source of primer and use of the method. For example, for diagnostic applications, depending on the complexity of the target sequence, the oligonucleotide primer typically contains 15-25 or more nucleotides, although it may contain fewer nucleotides.

[0142] The primers herein are selected to be “substantially” complementary to different strands of a particular target DNA sequence. This means that the primers must be sufficiently complementary to hybridize with their respective strands. Therefore, the primer sequence need not reflect the exact sequence of the template. For example, a non-complementary nucleotide fragment may be attached to the 5′ end of the primer, with the remainder of the primer sequence being complementary to the strand. Alternatively, non-complementary bases or longer sequences can be interspersed into the primer, provided that the primer sequence has sufficient complementarity with the sequence of the strand to hybridize therewith and thereby form the template for the synthesis of the extension product.

[0143] A “chimeric protein” or “fusion protein” comprises all or (preferably a biologically active) part of a first polypeptide operably linked to a heterologous polypeptide. Chimeric proteins or peptides are produced, for example, by combining two or more proteins having two or more active sites. In a chimeric or fusion protein, a first polypeptide may be covalently attached to an entity which may provide additional function or enhance the use or application of the first polypeptide(s), including for instance a tag, label, targeting moiety or ligand, a cell binding or cell recognizing motif or agent, an antibacterial agent, an antibody, an antibiotic. Exemplary labels include a radioactive label, such as the isotopes ³H, ¹⁴C, ³²P, ³⁵S, ³⁶Cl, ⁵¹Cr, ⁵⁷Co, ⁵⁸Co, ⁵⁹Fe, ⁹⁰Y, ¹²⁵I, ¹³¹I, and ¹⁸⁶Re. The label may be an enzyme, and detection of the labeled lysin polypeptide may be accomplished by any of the presently utilized or accepted colorimetric, spectrophotometric, fluorospectrophotometric, amperometric or gasometric techniques known in the art. Chimeric protein and peptides can act independently on the same or different molecules or targets, and hence have a potential to provide multiple activities, such as to treat or stimulate immune response against two or more different bacterial infections or infective agents at the same time.

[0144] As used herein, the term “mutant”, refers to a variation in a nucleic acid or DNA or RNA sequence or in a chromosome structure from that which is considered a normal or wild-type sequence or chromosome without defect. In the context of a nucleic acid, DNA or RNA sequence, examples of mutations include point mutations, insertions, and deletions. A deletion includes deletion of a part or entire gene. Such mutations may have functional effects such as, for example, a decrease in function of a gene product, ablation of function in a gene product, and/or a new or altered function in a gene product.

[0145] As used herein, “mutation” includes any alteration in one or more nucleic acids in a genomic sequence, including one or more base changes, deletions, and/or insertions, that result in silent mutations, non-sense mutations, mis-sense mutations, or any such other mutations that result in reduced function of a gene or result in an inactive or otherwise non-functional protein encoded by a gene. Mutations include but are not limited to mutations that result in premature stop codons, aberrant splicing, altered or failed transcription, or altered or failed translation. A gene comprising a mutation can have more than one mutation. Mutations include deletion of a gene or a significant portion of a gene, particularly such that the gene's protein is not produced or expressed and/or is inactive. Mutations include insertions, such as wherein a foreign or heterologous sequence or nucleic acid is introduced into or otherwise inserted in the gene. Such insertion may block or eliminate translation to active or full length protein, or may result in a significantly altered and distinct protein that is not active as the wild type. An insertion may facilitate isolation, detection, selection of the gene mutant, such as by introduction or insertion of an antibiotic resistance gene or a detectable marker or protein. In particular embodiments of the invention and as described herein, the mutation, including one or more mutation, is a non-natural mutation and is genetically engineered or recombinantly generated. In some embodiments, the mutation is genetically engineered or generated recombinantly in vitro. In some embodiments, the mutation is genetically engineered or generated recombinantly in a cell.

[0146] In some embodiments, a mutation is generated whereby a gene, or a large or significant portion of a gene or protein encoding nucleic acid, is deleted. In embodiments, one or more gene or a large or significant portion of a gene or protein encoding nucleic acid is deleted for example via recombination methods. Recombination methods for targeted deletion of genes are known and available to one skilled in the art. Such methods include homologous recombination, such as via an introduced plasmid, phage or nucleic acid such as DNA or linear DNA fragemt(s), recombination enzymes or recombinase enzyme mediated recombination, for example via recombinase recognition or target sequences sequences, transposon mediated recombination and gene replacement.

[0147] In accordance with some embodiments of the present invention, deletion or inactivation mutations have been generated whereby one or more gene(s) are deleted or inactivated in the genome of Bacillus subtilis bacteria. Deletion mutants have thus been generated and utilized or have been utilized whereby deletions in each of the genes were constructed to provide new Bacillus subtilis mutant strains of bacteria. In some embodiments, these mutant bacteria are altered in growth.

[0148] In embodiments of the invention the gene mutation is a gene deletion mutation. In embodiments the gene mutation is a deletion generated by recombination, including wherein a substantive portion of the encoding region of the gene is deleted. In some embodiments, a substantive portion of the encoding gene is deleted and is replaced by insertion of a tag or marker, such as a detectable tag or a selectable marker.

[0149] The therapeutic or biologically active molecule may be any molecule, including a polypeptide or nucleic acid, having a useful or desired activity. A therapeutic biomolecule includes a biomolecule having a therapeutic effect. Examples of therapeutic biomolecules include antibody, a ribonucleic acid (RNA), and antigen. Antibody includes antibody fragments, such as VHH. RNA includes inactivating RNA, such as shRNA and siRNA. Antigen includes a biomolecule that stimulates an immune response. Examples of antigens include a peptide, polypeptide, protein, nucleic acid molecule, and carbohydrate molecule. In some embodiments, the molecule may be selected from an antibody, a ribonucleic acid (RNA), a peptide or protein, and an antigen.

[0150] Antibodies in accordance with the present disclosure include an immunoglobulin and particularly any polypeptide or protein having a binding domain which is, or is homologous to, an antibody binding domain. CDR grafted antibodies are also contemplated by this term. An “antibody” is any immunoglobulin, including antibodies and fragments thereof, that binds a specific epitope. The term encompasses polyclonal, monoclonal, and chimeric antibodies. The term “antibody(ies)” includes a wild type immunoglobulin (Ig) molecule, generally comprising four full length polypeptide chains, two heavy (H) chains and two light (L) chains, or an equivalent Ig homologue thereof (e.g., a camelid nanobody, which comprises only a heavy chain); including full length functional mutants, variants, or derivatives thereof, which retain the essential epitope binding features of an Ig molecule, and including dual specific, bispecific, multispecific, and dual variable domain antibodies. Also included within the meaning of the term “antibody” are any “antibody fragment”. An “antibody fragment” refers to a molecule comprising at least one polypeptide chain that is not full length, including (i) a Fab fragment, which is a monovalent fragment consisting of the variable light (VL), variable heavy (VH), constant light (CL) and constant heavy 1 (CH1) domains; (ii) a F(ab′)2 fragment, which is a bivalent fragment comprising two Fab fragments linked by a disulfide bridge at the hinge region; (iii) a heavy chain portion of an Fab (Fd) fragment, which consists of the VH and CH1 domains; (iv) a variable fragment (Fv), which consists of the VL and VH domains of a single arm of an antibody, (v) a domain antibody (dAb) fragment, which comprises a single variable domain (Ward, E. S. et al., Nature 341, 544-546 (1989)); (vi) a camelid antibody; (vii) an isolated complementarity determining region (CDR); (viii) a Single Chain Fv Fragment wherein a VH domain and a VL domain are linked by a peptide linker which allows the two domains to associate to form an antigen binding site (Bird et al, Science, 242, 423-426, 1988; Huston et al, PNAS USA, 85, 5879-5883, 1988); (ix) a diabody, which is a bivalent, bispecific antibody in which VH and VL domains are expressed on a single polypeptide chain, but using a linker that is too short to allow for pairing between the two domains on the same chain, thereby forcing the domains to pair with the complementarity domains of another chain and creating two antigen binding sites (WO94/13804; P. Holliger et al Proc. Natl. Acad. Sci. USA 90 6444-6448, (1993)); and (x) a linear antibody, which comprises a pair of tandem Fv segments (VH-CH1-VH-CH1) which, together with complementarity light chain polypeptides, form a pair of antigen binding regions; (xi) multivalent antibody fragments (scFv dimers, trimers and/or tetramers (Power and Hudson, J Immunol. Methods 242: 193-204 9 (2000)); (xii) a minibody, which is a bivalent molecule comprised of scFv fused to constant immunoglobulin domains, CH3 or CH4, wherein the constant CH3 or CH4 domains serve as dimerization domains (Olafsen T et al (2004) Prot Eng Des Sel 17(4):315-323; Hollinger P and Hudson P J (2005) Nature Biotech 23(9):1126-1136); and (xiii) other non-full length portions of heavy and/or light chains, or mutants, variants, or derivatives thereof, alone or in any combination. Chimeric molecules comprising an immunoglobulin binding domain, or equivalent, fused to another polypeptide are also included.

[0151] An “antibody combining site” is that structural portion of an antibody molecule comprised of light chain or heavy and light chain variable and hypervariable regions that specifically binds antigen. Exemplary antibody molecules are intact immunoglobulin molecules, substantially intact immunoglobulin molecules and those portions of an immunoglobulin molecule that contains the paratope, including those portions known in the art as Fab, Fab′, F(ab′)₂ and F(v). Antibodies may also be bispecific, wherein one binding domain of the antibody has a first binding specificity, and the other binding domain has a different specificity, e.g. to recruit an effector function or the like. The other binding domain may be an antibody that recognizes or targets a particular cell type or to recognize particular cell receptors and/or modulate cells in a particular fashion, as for instance an immune modulator (e.g., interleukin(s)), a growth modulator or cytokine or a toxin (e.g., ricin) or anti-mitotic or apoptotic agent or factor.

[0152] The term “antigen binding domain” describes the part of an antibody which comprises the area which specifically binds to and is complementary to part or all of an antigen. Where an antigen is large, an antibody may bind to a particular part of the antigen only, which part is termed an epitope. An antigen binding domain may be provided by one or more antibody variable domains. An antigen binding domain may comprise an antibody light chain variable region (VL) and an antibody heavy chain variable region (VH), or may only comprise an antibody heavy chain variable region (VH).

[0153] Immunoconjugates or antibody fusion proteins are also contemplated, wherein the antibodies, antibody molecules, or fragments thereof, applicable in the present invention are conjugated or attached to other molecules or agents. Such immunoconjugates or antibody fusion proteins may further include, but are not limited to such antibodies, molecules, or fragments conjugated to a chemical ablation agent, toxin, immunomodulator, cytokine, cytotoxic agent, chemotherapeutic agent, antimicrobial agent or peptide, cell wall and/or cell membrane disrupter, or drug.

[0154] Single domain antibodies are included as a particular embodiment of the therapeutic or biologically active molecules delivered in accordance with the intracellular delivery platform provided herein and expressed by the self amplifying nucleic acid. Single domain antibodies were initially isolated from camelid animals and have been designated interchangeably as camelid antibodies, nanobodies or VHH. A VHH antibody corresponds to the variable region of an antibody heavy chain and has a very small size of around 15 kDa—hence the name “nanobody”. The advantage of these antibody-derived molecules is their small size which can enable their binding to hidden epitopes not accessible to whole antibodies. In the context of therapeutic applications, a small molecular weight also means an efficient penetration and fast clearance. Both scFv and VHH nanobodies can he linked to the Fc fragment of the desired species and keep their specificity and binding properties and are then termed minibody.

[0155] Delivering nanobodies: Nanobodies are small, low molecular weight, single-domain, heavy-chain only antibody found in camelids. Owing to its smaller size, genes of these proteins are easy to clone inside a plasmid. Therefore, by using molecular cloning techniques, nanobodies against various antigens can be presented in the systemic circulation. The present invention and intracellular delivery platform has been utilized to deliver and express antibody fragments, particularly VHH or nanobodies.

[0156] An antigen is a substance, such as a protein or peptide, which induces an immune response, especially the production of antibodies. In immunology, an antigen is a molecule or molecular structure, such as may be present on the outside of a pathogen, that can be bound by an antigen-specific antibody or B-cell antigen receptor. The presence of antigens in the body normally triggers an immune response. Antigens, or peptide or protein sequences, capable of eliciting an immune response, particularly a protective or neutralizing immune response, have been defined in many systems. The basis of vaccines is the presentation of one or more antigen from an infectious agent to an animal or host, such that the animal or host has an immune response and raises antibodies against the infectious agent. This immune response and these reaised antibodies serve to protect the host or animal from further infection, disease or illness by the infectious agent. In embodiments of the present invention, vaccines provided and contemplated herein are capable of and utilized to generate mucosal, systemic and cellular immunity against one or more pathogen(s).

[0157] An antigen may include all or a portion of a protein. In particular, an antigen may be an antigenic portion or fragment of a full length protein. An antigen may be a non-natural fragment of a protein. The delivery platform may be utilized to express one or more antigen for a particular pathogen. Multiple antigens may be expressed from a single self-amplifying RNA for example. Multiple antigens of an infectious agent or pathogen may be expressed from a single B. subtilis 105 strain.

[0158] There are various peptides or proteins which act independently as therapeutic biolmolecules. Among these are anti-infective or anti-bacterial peptides which can serve to block or treat infection by infectious agents or bacteria.

[0159] A wide range of antimicrobial peptides is secreted in plants and animals to challenge attack by foreign viruses, bacteria or fungi (Boman, H. G. (2003) J. Intern. Med. 254 (3):197-215). These form part of the innate immune response to infection, which is short term and fast acting relative to humoral immunity. These peptides are heterogeneous in length, sequence and structure, but most are small, cationic and amphipathic (Zasloff, M. (2002) Nature 415(6870):389-395). Exemplary such known antimicrobial peptides are listed at an antimicorobial database (aps.unmc.edu/AP/main.php; Wang Z and Wang G (2004) NAR 32:D590-D592) and the content and disclosure of this site is incorporated herein by reference in its entirety. While the external cell wall may be the initial target, several lines of evidence suggest that antimicrobial peptides act by lysing bacterial membranes. Cells become permeable following exposure to peptides, and their membrane potential is correspondingly reduced. Protamines or polycationic amino acid peptides containing combinations of one or more recurring units of cationic amino acids, such as arginine (R), tryptophan (W), lysine (K), even synthetic polyarginine, polytryptophan, polylysine, have been shown to be capable of killing microbial cells.

[0160] A cell-wall degrading enzyme is an enzyme which degrades components of the cell wall, including peptidoglycans, such as murein and pseudomurein, chitin, and teichoic acid. Cell-wall degrading enzymes can include, but are not limited to amidases, muramidases, endopeptidases, glucosaminidases. Bacteriophage lysins are cell wall degrading anti-bacterial enzymes encoded by phage in bacteria. Lysins are peptidoglycan hydrolases that break bonds in the bacterial wall, rapidly hydrolyzing covalent bonds essential for peptidoglycan integrity, causing bacterial lysis and concomitant progeny phage release. Bacteriophage lytic enzymes have been established as useful in the assessment and specific treatment of various types of infection in subjects through various routes of administration. Phage associated lytic enzymes have been identified and cloned from various bacteriophages, each shown to be effective in killing specific bacterial strains.

[0161] The application of bacteria such as Bacillus as a vector to express, produce or deliver immune, prophylactic or any such other therapeutic biomolecules pmvides a number of applicable products and therapies targeting multiple disease conditions across a range of host species. There are multiple ways whereby live bacterial vectors and expression systems can be modified to deliver heterologous antigens, for example, as chromosomal or plasmid integrated genes, or a payload of eukaryotic antigen-expression plasmids (so-called DNA vaccines), but these systems have limitations, including in their means of expressing the heterologous antigens. More recently, RNA-based vaccines, both messenger RNA (mRNA) and self-amplifying replicons (SAM) are emerging as an increasingly promising alternative to traditional plasmid DNA for gene vaccination (DNA vaccines). RNA vaccines have been shown to elicit antigen specific antibody and cellular immune responses against several viral pathogens with some clear advantages over DNA. The present invention provides a novel delivery platform for delivering antigens, immunogens, antibodies, bioactive peptides, RNAs and other biotherapeutics and therapeutic biomolecules. The present invention provides a novel delivery platform for delivering immunogens, antibodies and therapeutic biomolecules as vaccines, including prophylactic and therapeutic vaccines.

[0162] The intracellular delivery platform and production system of the present disclosure includes a genetically modified bacterium having a self-amplifying or integrated nucleic acid capable of encoding a biomolecule or heterologous protein.

[0163] In an embodiment, a probiotic composition is provided comprising the genetically modified Bacillus subtilis strain 105 herein comprising nucleic acid encoding a biomolecule or heterologous protein for production, for delivery, of interest, or of therapeutic importance.

[0164] In some embodiments, the composition includes a genetically modified Bacillus subtilis strain 105 wherein ELA191105 or an active and effective variant thereof has been modified. In some embodiments, the composition includes a genetically modified Bacillus subtilis strain 105 and also, including in combination, another isolated Bacillus strain, particularly a distinct Bacillus strain having probiotic properties or activity, including particularly when combined with strain 105. In some embodiments, the B subtilis strain 105 can be combined with one or more isolated Bacillus amyloliquefaciens strain, particularly selected from ELA191024 (corresponding to ATCC deposit PTA-126784), ELA191036 (corresponding to ATCC deposit PTA-126785), ELA191006 (corresponding to ATCC deposit PTA-127065) and ELA202071 (corresponding to ATCC deposit PTA-127064).

[0165] These probiotic strain combinations and compositions and methods thereof are described and provided in PCT/US2021/051973 published as WO2022/067052 Mar. 31, 2022, which is incorporated herein by reference.

[0166] In some embodiments, the composition does not include Lactobacillus. An example of a LactoBacillus species includes LactoBacillus reuteri and LactoBacillus crispatus, LactoBacillus vaginalis, LactoBacillus helviticus, and LactoBacillus johnsonii.

[0167] In some embodiments, the composition does not include non-Bacillus strains. Examples of non-Bacillus strains include Lactobacillus, Leuconostoc (e.g., Leuconostoc mesenteroides).

[0168] The composition may include or comprise live bacteria or bacterial spores, or a combination thereof.

[0169] In some embodiments, the composition does not include antibiotics. Exemplary antibiotics include tetracycline, bacitracin, tylosin, salinomycin, virginiamycin and bambermycin.

[0170] The compositions described above may include a carrier suitable for animal consumption or use. Examples of suitable carriers include edible food grade material, mineral mixture, gelatin, cellulose, carbohydrate, starch, glycerin, water, glycol, molasses, corn oil, animal feed, such as cereals (barley, maize, oats, and the like), starches (tapioca and the like), oilseed cakes, and vegetable wastes. In some embodiments, the compositions include vitamins, minerals, trace elements, emulsifiers, aromatizing products, binders, colorants, odorants, thickening agents, and the like.

[0171] In some embodiments, the compositions include one or more biologically active molecule or therapeutic molecule. Examples of the aforementioned include ionophore; vaccine; antibiotic; antihelmintic; virucide; nematicide; amino acids such as methionine, glycine, and arginine; fish oil; krill oil; and enzymes.

[0172] In some embodiments, the compositions or combinations may additionally include one or more prebiotic. In some embodiments, the compositions may be administered along with or may be coadministered with one or more prebiotic. Prebiotics may include organic acids or non-digestible feed ingredients that are fermented in the lower gut and may serve to select for beneficial bacteria. Prebiotics may include mannan-oligosaccharides, fructo-oligosaccharides, galacto-oligosaccharides, chito-oligosaccharides, isomalto-oligosaccharides, pectic-oligosaccharides, xylo-oligosaccharides, and lactose-oligosaccharides.

[0173] The composition may be formulated as animal feed, feed additive, animal food, food ingredient, water additive, water-mixed additive, consumable solution, consumable spray additive, consumable solid, consumable gel, injection, or combinations thereof. The composition may be formulated and suitable for use as or in one or more of animal feed, feed additive, food ingredient, water additive, water-mixed additive, consumable solution, consumable spray additive, consumable solid, consumable gel, injection, or combinations thereof. The composition may be suitable and prepared for use as animal feed, feed additive, animal food, food ingredient, water additive, water-mixed additive, consumable solution, consumable spray additive, consumable solid, consumable gel, injection, or combinations thereof.

[0174] In some embodiments, the disclosure provides for the use of any of the compositions described above in a therapy or treatment or to improve a phenotypic trait in an animal.

[0175] In embodiments of the invention, an animal may include a farmed animal or livestock or a domesticated animal. Livestock or farmed animal may include cattle (e.g. cows or bulls (including calves)), poultry (including broilers, chickens and turkeys), pigs (including piglets), birds, aquatic animals such as fish, agastric fish, gastric fish, freshwater fish such as salmon, cod, trout and carp, e.g. koi carp, marine fish such as sea bass, and crustaceans such as shrimps, mussels and scallops), horses (including race horses), sheep (including lambs). A domesticated animal may be a pet or an animal maintained in a zoological environment and may include any relevant animal including canines (e.g. dogs), felines (e.g. cats), rodents (e.g. guinea pigs, rats, mice), birds, fish (including freshwater fish and marine fish), and horses. The animal may be a human.

[0176] The animal may be a pregnant or breeding animal, such as a pregnant sow or a pregnant pig.

[0177] Examples of improving a phenotypic trait includes decreasing pathogen-associated lesion formation in the gastrointestinal tract or otherwise in the animal, decreasing colonization of pathogens, decreasing transmission of one or more pathogen, promoting immune response or generation of antibodies against a pathogen, and increasing gut health or characteristic (reducing permeability and inflammation).

[0178] Examples of pathogens include Eimeria spp., Salmonella Typhimurium, Salmonella Infantis, Salmonella Hadar, Salmonella Enteritidis, Salmonella Newport, Salmonella Kentucky, Clostridium perfringens, Staphylococcus aureus, Streptoccus uberis, Streptococcus suis, Streptococcus pneumoniae, Escherichia coli, Campylobacter jejuni, Clostridium perfringes, Fusobacterium necrophorum, Avian pathogenic Escherichia coli (APEC), Pisciricketsia salmonis, Tenacibaculum spp., Salmonella Lubbock, Trueperella pyogenes, shiga toxin producing E. coli, enterotoxigenic E. coli, Campylobacter coli, and Lawsonia intracellularis.

[0179] A pathogen may be a bacteria, a parasite or a virus. The virus may include a pathogenic virus infecting animals, including humans, livestock animals or domesticated animals and may be specific for a particular animal such as a poultry virus or a swine virus.

[0180] The compositions may be used to treat an infection particularly a bacterial infection. In some aspects, the compositions described above are used to treat an infection from at least one of Eimeria spp., Salmonella Typhimurium, Salmonella Infantis, Salmonella Hadar, Salmonella Enteritidis, Salmonella Newport, Salmonella Kentucky, Clostridium perfringens, Staphylococcus aureus, Streptoccus uberis, Streptococcus suis, Escherichia coli, Campylobacter jejuni, Fusobacterium necrophorum, Avian pathogenic Escherichia coli (APEC), Salmonella Lubbock, Trueperella pyogenes, shiga toxin producing E. coli, enterotoxigenic E. coli, Campylobacter coli, and Lawsonia intracellularis. The compositions may be used to inhibit infection, particularly a bacterial infection. Infection may be by one or more of Eimeria spp., Salmonella Typhimurium, Salmonella Infantis, Salmonella Hadar, Salmonella Enteritidis, Salmonella Newport, Salmonella Kentucky, Clostridium perfringens, Staphylococcus aureus, Streptoccus uberis, Streptococcus suis, Escherichia coli, Campylobacter jejuni, Fusobacterium necrophorum, Avian pathogenic Escherichia coli (APEC), Salmonella Lubbock, Trueperella pyogenes, shiga toxin producing E. coli, enterotoxigenic E. coli, Campylobacter coli, and Lawsonia intracellularis.

[0181] In some aspects, the compositions described above are used to reduce colonization by or inhibit colonization by a bacteria in an animal, particularly in a herd or group of animals, particularly of pathogenic bacteria. In some aspects, the compositions described above are used to reduce colonization by or inhibit colonization of at least one of Eimeria spp., Salmonella Typhimurium, Salmonella Infantis, Salmonella Hadar, Salmonella Enteritidis, Salmonella Newport, Salmonella Kentucky, Clostridium perfringens, Staphylococcus aureus, Streptoccus uberis, Streptococcus suis, Escherichia coli, Campylobacter jejuni, Fusobacterium necrophorum, Avian pathogenic Escherichia coli (APEC), Salmonella Lubbock, Trueperella pyogenes, shiga toxin producing E. coli, enterotoxigenic E. coli, Campylobacter coli, and Lawsonia intracellularis.

[0182] In some aspects, the compositions described above are used to reduce transmission of bacteria, particularly pathogenic bacteria, in an animal pen or in a group or herd of animals. In some aspects, the compositions described above are used to reduce transmission in an animal pen or in a group or herd of animals of at least one of Eimeria spp., Salmonella Typhimurium, Salmonella Infantis, Salmonella Hadar, Salmonella Enteritidis, Salmonella Newport, Salmonella Kentucky, Clostridium perfringens, Staphylococcus aureus, Streptoccus uberis, Streptococcus suis, Escherichia coli, Campylobacter jejuni, Fusobacterium necrophorum, Avian pathogenic Escherichia coli (APEC), Salmonella Lubbock, Trueperella pyogenes, shiga toxin producing E. coli, enterotoxigenic E. coli, Campylobacter coli, and Lawsonia intracellularis.

[0183] In some aspects, the compositions described above are used to reduce bacterial load, particularly pathogenic bacteria or clinically significant bacteria, including the number or amount of bacteria in the gut or gastrointestinal tract of an animal. The bacteria may be selected from at least one of Eimeria spp., Salmonella Typhimurium, Salmonella Infantis, Salmonella Hadar, Salmonella Enteritidis, Salmonella Newport, Salmonella Kentucky, Clostridium perfringens, Staphylococcus aureus, Streptoccus uberis, Streptococcus suis, Escherichia coli, Campylobacter jejuni, Fusobacterium necrophorum, Avian pathogenic Escherichia coli (APEC), Salmonella Lubbock, Trueperella pyogenes, shiga toxin producing E. coli, enterotoxigenic E. coli, Campylobacter coli, and Lawsonia intracellularis.

[0184] In some aspects, the compositions described above are used to treat at least one of inflammatory bowel disease, obesity, liver abscess, ruminal acidosis, leaky gut syndrome, piglet diarrhea, necrotic enteritis, coccidiosis, salmon ricketsial septicemia, and foodborne diseases.

[0185] The compositions may further include one or more component or additive. The one or more component or additive may be a component or additive to facilitate administration, for example by way of a stabilizer or vehicle, or by way of an additive to enable administration to an animal such as by any suitable administrative means, including in aerosol or spray form, in water, in feed or in an injectable form. Administration to an animal may be by any known or standard technique. These include oral ingestion, gastric intubation, or broncho-nasal spraying. The compositions disclosed herein may be administered by immersion, intranasal, intramammary, topical, mucosally, or inhalation. When the animal is a bird the treatment may be administered in ovo or by spray inhalation.

[0186] Compositions may include a carrier in which the bacterium or any such other components is suspended or dissolved. Such carrier(s) may be any solvent or solid or encapsulated in a material that is non-toxic to the inoculated animal and compatible with the organism. Suitable pharmaceutical carriers include liquid carriers, such as normal saline and other non-toxic salts at or near physiological concentrations, and solid carriers, such as talc or sucrose and which can also be incorporated into feed for farm animals. When used for administering via the bronchial tubes, the composition is preferably presented in the form of an aerosol. A dye may be added to the compositions hereof, including to facilitate chacking or confirming whether an animal has ingested or breathed in the composition.

[0187] When administering to animals, including farm animals, administration may include orally or by injection. Oral administration can include by bolus, tablet or paste, or as a powder or solution in feed or drinking water. The method of administration will often depend on the species being feed or administered, the numbers of animals being fed or administered, and other factors such as the handling facilities available and the risk of stress for the animal.

[0188] The dosages required will vary and need be an amount sufficient to induce an immune response or to effect a biological or phenotypic change or response expected or desired. Routine experimentation will establish the required amount. Increasing amounts or multiple dosages may be implemented and used as needed.

[0189] In an embodiment of the invention, the bacterial strains are administered in doses indicated as CFU/g or colony forming units of bacteria per gram. In an embodiment, the dose is in the range of 1×10³ to 1×10⁹ CFU/g. In an embodiment, the dose is in the range of 1×10³ to 1×10⁷. In an embodiment, the dose is in the range of 1×10′ to 1×10⁶. In an embodiment, the dose is in the range of 5×10⁴ to 1×10⁶. In an embodiment, the dose is in the range of 5×10′ to 6×10⁵. In an embodiment, the dose is in the range of 7×10⁴ to 3×10⁵. In an embodiment, the dose is approximately 50K, 75K, 100K, 125K, 150K, 200K, 300K, 400K, 500K, 600K CFU/g.

[0190] Administration of the compositions disclosed herein may include co-administration with a vaccine or therapeutic compound. Administration of the vaccine or therapeutic compound includes administration prior to, concurrently, or after the composition disclosed herein.

[0191] Suitable vaccines in accordance with this embodiment include a vaccine that aids in the prevention of coccidiosis.

[0192] In some embodiments, the methods described above are administered to an animal in the absence of antibiotics.

[0193] An antigen is a substance, such as a protein or peptide, which induces an immune response, especially the production of antibodies. In immunology, an antigen is a molecule or molecular structure, such as may be present on the outside of a pathogen, that can be bound by an antigen-specific antibody or B-cell antigen receptor. The presence of antigens in the body normally triggers an immune response. Antigens. or peptide or protein sequences, capable of eliciting an immune response, particularly a protective or neutralizing immune response, have been defined in many systems. The basis of vaccines is the presentation of one or more antigen from an infectious agent to an animal or host, such that the animal or host has an immune response and raises antibodies against the infectious agent. This immune response and these reaised antibodies serve to protect the host or animal from further infection, disease or illness by the infectious agent. In embodiments of the present invention, vaccines provided and contemplated herein are capable of and utilized to generate mucosal, systemic and cellular immunity against one or more pathogen(s).

[0194] An antigen may include all or a portion of a protein. In particular, an antigen may be an antigenic portion or fragment of a full length protein. An antigen may be a non-natural fragment of a protein. The delivery platform may be utilized to express one or more antigen for a particular pathogen. Multiple antigens may be expressed from a single self-amplifying RNA for example. Multiple antigens of an infectious agent or pathogen may be expressed from a single modified B subtilis 105 strain.

[0195] Avian coccidosis is a common poultry disease caused by Eimeria. Control of coccidosis has been approached by medicating feed with anticocciddial drugs or administering vaccines containing low doses of virulent or attenuated Eimeria oocysts. Problems of drug resistance and nonuniform administration of these Eimeria resulting in variable immunity prompt efforts to develop improved and recombinant Eimeria vaccines and other approaches to stimulate immunity and address cocciosis disease.

[0196] Eimeria is a genus of parasites that includes various species capable of causing the disease coccidiosis in animals such as cattle, poultry, dogs (especially puppies), cats (especially kittens), and smaller ruminants including sheep and goats. Species of this genus infect a wide variety of hosts. The most prevalent species of Eimeria that cause coccidiosis in cattle are E. bovis, E. zuernii, and E. auburnensis.

[0197] Delivery of an antigen capable of generating an immune response via the live intraceullular delivery platform and using the SAM vectors of the present invention has been demonstrated herein. Coccidial vaccine (Poultry): Salmonella Typhimurium was modified to deliver cross-protective antigens covering Eimeria tenella, E. maxima and E. acervulina as a part of SAM payload. Eimeria tenalla elongation factor-1α; EtAMA1; EtAMA2; Eimeria tenella 5401; Eimeria acervuline lactate dehydrogenase antigen gene; Eimeria maxima surface antigen gene; Glyceraldehyde 3-phosphate Dehydrogenase (GAPDH); Eimeria common antigen 14-3-3 antigens were delivered and expressed in an applicable system.

[0198] There are various peptides or proteins which act independently as therapeutic biolmolecules. Among these are anti-infective or anti-bacterial peptides which can serve to block or treat infection by infectious agents or bacteria.

[0199] A wide range of antimicrobial peptides is secreted in plants and animals to challenge attack by foreign viruses, bacteria or fungi (Boman, H. G. (2003) J. Intern. Med. 254 (3):197-215). These form part of the innate immune response to infection, which is short term and fast acting relative to humoral immunity. These peptides are heterogeneous in length, sequence and structure, but most are small, cationic and amphipathic (Zasloff, M. (2002) Nature 415(6870):389-395). Exemplary such known antimicrobial peptides are listed at an antimicorobial database (aps.unmc.edu/AP/main.php; Wang Z and Wang G (2004) NAR 32:D590-D592) and the content and disclosure of this site is incorporated herein by reference in its entirety. While the external cell wall may be the initial target, several lines of evidence suggest that antimicrobial peptides act by lysing bacterial membranes. Cells become permeable following exposure to peptides, and their membrane potential is correspondingly reduced. Protamines or polycationic amino acid peptides containing combinations of one or more recurring units of cationic amino acids, such as arginine (R), tryptophan (W), lysine (K), even synthetic polyarginine, polytryptophan, polylysine, have been shown to be capable of killing microbial cells.

[0200] A cell-wall degrading enzyme is an enzyme which degrades components of the cell wall, including peptidoglycans, such as murein and pseudomurein, chitin, and teichoic acid. Cell-wall degrading enzymes can include, but are not limited to amidases, muramidases, endopeptidases, glucosaminidases. Bacteriophage lysins are cell wall degrading anti-bacterial enzymes encoded by phage in bacteria. Lysins are peptidoglycan hydrolases that break bonds in the bacterial wall, rapidly hydrolyzing covalent bonds essential for peptidoglycan integrity, causing bacterial lysis and concomitant progeny phage release. Bacteriophage lytic enzymes have been established as useful in the assessment and specific treatment of various types of infection in subjects through various routes of administration. Phage associated lytic enzymes have been identified and cloned from various bacteriophages, each shown to be effective in killing specific bacterial strains.

[0201] The present invention has wide applicability to the development of effective immune stimulating compositions, immune promotion compositions, and vaccines against bacterial, fungal, parasite or viral disease agents where local immunity is important and might be a first line of defense. Such vaccines may be applicable to hatchery or field vaccine programs, particularly in farm and feed animals. Viral vaccines can be produced against either DNA or RNA viruses. Vaccines to protect against infection by pathogenic fungi, protozoa and parasites are also contemplated by this invention. The invention provides both therapeutic vaccines, such as wherein an antibody or portion thereof is administered and expressed via the delivery platform, for example to an animal with a disease or infection, and prophylactic vaccines, wherein a protein or antigen is administered and expressed via the delivery platform and serves to stimulate immunity in an animal.

[0202] Any examples or illustrations given herein are not to be regarded in any way as restrictions on, limits to, or express definitions of any term or terms with which they are utilized. Instead, these examples or illustrations are to be regarded as being described with respect to one particular embodiment and as being illustrative only. Those of ordinary skill in the art will appreciate that any term or terms with which these examples or illustrations are utilized will encompass other embodiments which may or may not be given therewith or elsewhere in the specification and all such embodiments are intended to be included within the scope of that term or terms. Language designating such nonlimiting examples and illustrations includes, but is not limited to: “for example,” “for instance,” “e.g.,” and “in one embodiment.” In this specification, groups of various parameters containing multiple members are described. Within a group of parameters, each member may be combined with any one or more of the other members to make additional sub-groups. For example, if the members of a group are a, b, c, d, and e, additional sub-groups specifically contemplated include any one, two, three, or four of the members, e.g., a and c; a, d, and e; b, c, d, and e; etc.

[0203] Throughout this specification, quantities are defined by ranges, and by lower and upper boundaries of ranges. Each lower boundary can be combined with each upper boundary to define a range. The lower and upper boundaries should each be taken as a separate element. Two lower boundaries or two upper boundaries may be combined to define a range.

### Deposit Information

[0204] Bacillus subtillis strain “ELA191105” was deposited on 19 Jun. 2020 according to the Budapest Treaty in the American Type Culture Collection (ATCC), ATCC Patent Depository, 10801 University Boulevard, Manassas, Va., 20110, USA. The deposit has been assigned ATCC Patent Deposit Number PTA-126786.

[0205] Access to the deposit will be available during the pendency of this application to persons determined by the Commissioner of Patents and Trademarks to be entitled thereto under 37 C.F.R. § 1.14 and 35 U.S.C. § 122. Upon allowance of any embodiments in this application, all restrictions on the availability to the public of the variety will be irrevocably removed.

[0206] The deposit will be maintained in the ATCC depository, which is a public depository, for a period of 30 years, or 5 years after the most recent request, or for the effective life of the patent, whichever is longer, and will be replaced if a deposit becomes nonviable during that period.

[0207] The present disclosure may be better understood with reference to the examples, set forth below. The following examples are put forth so as to provide those of ordinary skill in the art with a complete disclosure and description of how the compounds, compositions, and/or methods claimed herein are made and evaluated, and are intended to be purely exemplary and are not intended to limit the disclosure. It will be appreciated that other embodiments and uses will be apparent to those skilled in the art and that the invention is not limited to these specific illustrative examples or preferred embodiments.

### Example 1

### Isolation of Bacillus Subtilis Strain and Strain Characterization

[0208] Samples are isolated from chicken cecal samples. The samples are either heated to 90° C. for 10 minutes or treated with ethanol to a final concentration of 50% for 1 hour for spore isolation. The treated samples are plated on LB medium and the resulting colonies are purified by three sequential transferred onto LB agar plates. Identity of isolates is determined by amplification of 16 S-rRNA gene followed by DNA Sanger sequencing of the PCR amplicon.

[0209] Inhibition of bacterial strains by ELA191105 was tested. Table 1 summarizes the results of inhibition of other isolated bacterial strains by B. subtilis strain 105.

TABLE 1

| Strain | | | APEC | APEC | APEC | | Salmonella | C. |
|---|---|---|---|---|---|---|---|---|
| ID | Origin | ID | O2 | O78 | O18 | CP15* | Thypimurium | jejuni |
| 105 | Poultry | Bacillus | +++ | + | +++ | ++ | + | − |
| | cecum, | subtilis | | | | | | |
| | BRRS | | | | | | | |

Note:
*Clostridium perfringens strain 15

[0210] Antibiotic Susceptibility: Antibiotic susceptibility of Strain ELA191105 was tested. ELA191105 is susceptible to chloramphenicol, gentamicin, tetracycline, erythromycin, clindamycin, streptomycin, kanamycin, and vancomycin.

[0211] Growth Media: Growth on arbinoxylan and banana starch as the sole growth media was tested. ELA191105 is capable of growth on the aforementioned as the sole growth substrates.

[0212] Sporulation: Sporulation of ELA191105 was tested. ELA191105 formed spores in tested sporulation medium (Difco Sporulation Medium, DSM) and the culture is grown at 37° C. for 72 h.

[0213] Digestive Enzyme Analysis: Amylase and protease activities of ELA191105 was tested following protocol as described by Latorre, J D, 2016. Briefly, overnight culture of Bacillus isolate was spotted onto agar plate containing soluble starch and skim milk for amylase and protease assay, respectively. The plates were incubated at 37° C. for 48 h. The zone of clearance due to protease activity is observed directly whereas zone of clearance from amylase activity was visualized by flooding the surface of the plates with 5 mL of Gram's iodine solution. Protease activity of ELA191105 was tested by way of protease assay and amylase and protease activity are observed. Beta-mannanase activity for ELA191105 was tested and it is demonstrated that the strain is capable of digesting galactomannan.

[0214] Cytotoxicity Assay: Cytotoxicity of ELA191105 was tested against Vero cells. Cytotoxicity is measured by LDH cytotoxicity test. Positive control: Bacillus cereus DSM 31 (ATCC 14579) (78.6% cytotoxicity); Negative control: Bacillus licheniformis ATCC 14580 (−0.1% cytotoxicity); Test control: Subtilis 747 (CorrelinkTM strain) (8.7% cytotoxicity; non-toxic). ELA191105 strain is not cytotoxic to Vero cells. The percent cytotoxicity is less than 10.

[0215] Genomic Analysis: The genome of strain ELA191105 was sequenced and some genomic features are as follows: Contigs: 3; Coverage: 117×; % GC: 43%; Length (Mbp): 4.089.

[0216] ELA191105 possesses genes that are absent in other Bacillus strains used for genome comparison. Some of the unique genes include Metabolic enzymes (Phosphosulfolactate synthase, ethanolamine/propanediol utilization, Malate/lactate dehydrogenase); Antioxidant (Prokaryotic glutathione synthetase); Transporters (Organic Anion Transporter Polypeptide (OATP) family); and Digestive enzymes (alpha-amylase). Details regarding unique genes and metabolic analysis as well as exemplary antimicrobial peptides, secondary metabolite genes of ELA191105, including in comparison with other Bacillus strains is provided in U.S. Ser. No. 63/083,697 filed Sep. 25, 2020 and in U.S. Ser. No. 63/241,369 filed Sep. 7, 2021, each of which are incorporated by reference herein.

[0217] The genome nucleic acid sequence for strain 105 (ELA191105) is provided in SEQ ID NO:1 as a full genome sequence and in SEQ ID NOs: 2-6.

[0218] Table 2 summarizes some of the digestive enzyme identified in genomic analysis of the B. subtilis strain 105.

TABLE 2

| Digestive enzymes | ELA191105 |
|---|---|
| Lipase | Present |
| 3-Phytase | Present |
| Endo-1,4-beta-mannosidase (Beta-D-mannanase) | Present |
| 1,4-α-glucan branching enzyme GlgB | Present |
| 6-phospho-beta-galactosidase | Absent |
| Alpha-amylase | Present |
| Alpha-galactosidase | Present |
| Beta-glucanase | Present |
| Beta-hexosaminidase | Present |
| Endo-1,4-beta-xylanase A | Present |
| Endoglucanase | Present |
| L-Ala--D-Glu endopeptidase | Present |
| Maltose-6′ phosphate glucosidase | Present |
| Oligo-1,6-glucosidase | Present |
| Oligo-1,6-glucosidase 1 | Present |
| Pectate lyase | Present |
| Pectate lyase C | Present |
| Pectin lyase | Present |
| Pullulanase | Present |
| putative 6-phospho-beta- glucosidase | Present |
| putative oligo-1,6-glucosidase2 | Present |

[0219] Strain ELA191105 includes genes encoding bacteriocins, particularly SubtilosinA, Plipastatin, Surfactin, Bacillibactin and Bacilysin. In addition 2 clusters of Terpene-derived metabolites and 1 cluster of Polyketide-derived metabolites are present in ELA191105 strain.

### Example 2

### Global Metabolomics Analysis

[0220] A global metabolomics analysis of strain B. subtilis (ELA191105) was conducted. The strain was grown individually and the resulting cell pellet and supernatant analyzed to identify metabolites. Strains are grown at 37° C. for 24 hours in minimal media or rich media. Fresh media (no cells) were used as control samples. The metabolites in the supernatant represent molecules that are secreted by the cell. Minimal medium: M9 salts with 0.5 g casamino acids/L and 1% glucose. M9 salts contains Disodium Phosphate (anhydrous) 6.78 g/L, Monopotassium Phosphate 3 g/L, Sodium Chloride 0.5 g/L, Ammonium Chloride 1 g/L. Rich medium: Bacillus broth (per liter): Peptone 30 g; Sucrose 30 g; Yeast extract 8 g; KH2PO4 4 g; MgSO4 1.0 g; MnSO4 25 mg.

[0221] Samples are prepared using the automated MicroLab STAR® system from Hamilton Company. Several recovery standards are added prior to the first step in the extraction process for QC purposes. Samples are extracted with methanol under vigorous shaking for 2 min (Glen Mills GenoGrinder 2000) to precipitate protein and dissociate small molecules bound to protein or trapped in the precipitated protein matrix, followed by centrifugation to recover chemically diverse metabolites. The resulting extract is divided into five fractions: two for analysis by two separate reverse phase (RP)/UPLC-MS/MS methods using positive ion mode electrospray ionization (ESI), one for analysis by RP/UPLC-MS/MS using negative ion mode ESI, one for analysis by HILIC/UPLC-MS/MS using negative ion mode ESI, and one reserved for backup. Samples are placed briefly on a TurboVap® (Zymark) to remove the organic solvent. The sample extracts are stored overnight under nitrogen before preparation for analysis.

[0222] Ultrahigh Performance Liquid Chromatography-Tandem Mass Spectroscopy (UPLC-MS/MS): All methods utilize a Waters ACQUITY ultra-performance liquid chromatography (UPLC) and a Thermo Scientific Q-Exactive high resolution/accurate mass spectrometer interfaced with a heated electrospray ionization (HESI-II) source and Orbitrap mass analyzer operated at 35,000 mass resolution. The sample extract is dried then reconstituted in solvents compatible to each of the four methods. Each reconstitution solvent contains a series of standards at fixed concentrations to ensure injection and chromatographic consistency. One aliquot is analyzed using acidic positive ion conditions, chromatographically optimized for more hydrophilic compounds. In this method, the extract is gradient-eluted from a C18 column (Waters UPLC BEH C18-2.1×100 mm, 1.7 m) using water and methanol, containing 0.05% perfluoropentanoic acid (PFPA) and 0.1% formic acid (FA). A second aliquot is also analyzed using acidic positive ion conditions, but is chromatographically optimized for more hydrophobic compounds. In this method, the extract is gradient eluted from the aforementioned C18 column using methanol, acetonitrile, water, 0.05% PFPA, and 0.01% FA, and is operated at an overall higher organic content. A third aliquot is analyzed using basic negative ion optimized conditions using a separate dedicated C18 column. The basic extracts are gradient-eluted from the column using methanol and water, however with 6.5 mM Ammonium Bicarbonate at pH 8. The fourth aliquot is analyzed via negative ionization following elution from a HILIC column (Waters UPLC BEH Amide 2.1×150 mm, 1.7 sm) using a gradient consisting of water and acetonitrile with 10 mM Ammonium Formate, pH 10.8. The MS analysis alternates between MS and data-dependent MSn scans using dynamic exclusion. The scan range covers approximately 70-1000 m/z.

[0223] Data are subject to global untargeted metabolic profiling. Welch t-test and Principal Component Analysis (PCA) are used to analyze the data. Principal component analysis (PCA) is a mathematical procedure that reduces the dimensionality of the data while retaining most of the variation in a dataset. This approach allows visual assessment of the similarities and differences between samples (growth conditions, including media type and strains present). Populations that differ are expected to group separately and vice versa.

[0224] Metabolite Quantification and Block Correction: Peaks are quantified as area-under-the-curve detector ion counts. For studies spanning multiple days, a data adjustment step is performed to correct block variation resulting from instrument inter-day tuning differences, while preserving intra-day variance. Essentially, each compound is corrected in balanced run-day blocks by registering the daily medians to equal one (1.00), and adjusting each data point proportionately (termed the “block correction”). For studies that do not require more than one day of analysis, no adjustment of raw data is necessary, other than scaling for purposes of data visualization.

[0225] Metabolite is identified as unique to a strain if the value for the secreted metabolite is at least 1.5-fold greater than those of other strains or control strain single isolates. Unique metabolites for strain consortia are determined using >1.5-fold cut off compared to values of respective metabolites secreted by single isolates of the consortium. In rich medium, 231 metabolites were identified for strain ELA 191105, while 111 metabolites were identified in minimal medium, for a total of 272 metabolites. Overall, strain ELA 191105 had 77 unique metabolites, 45 which were at values above a 2-fold threshold, compared to other Bacillus strains used in the analysis.

[0226] Strain ELA191105 was cultured individually in minimal media or in rich media and the supernatant analyzed for secreted metabolites. Table 3 provides an exemplary list of metabolites secreted by the strain. Unless otherwise noted, the metabolite is at least 1.5 fold greater than the media control.

TABLE 3

| | Minimal media | Rich media |
|---|---|---|
| METABOLITE | ELA191105 | ELA191105 |
| N-acetyl-cadaverine | No | Yes^{A, B} |
| isovalerate (C5) | Yes^{A} | Yes^{A} |
| N-acetylisoleucine | Yes^{A, B, C} | Yes^{A, B, C} |
| Homocysteine | Yes^{A, B, C} | Yes^{A, B, C} |
| Homocystine | Yes^{A, B, C} | No |
| N-acetylcitrulline | Yes^{A, B, C} | No |
| Glucoronate | No | Yes^{A, B, C} |
| alpha-ketoglutarate | Yes^{A, B, C} | No |
| 5-hydroxyhexanoate | Yes^{A, B} | No |
| glycerol 3-phosphate | Yes^{A} | Yes |
| 5-aminoimidazole-4-carboxamide | No | Yes^{A, B, C} |
| Hypoxanthine | Yes^{A, B, C} | No |
| Guanine | Yes^{A, B, C} | No |
| Orotate | Yes^{A, B, C} | No |
| Orotidine | No | No |
| 5,6-dihydrouridine | Yes^{A, B} | Yes^{A, B, C} |
| 3-dehydroshikimate | Yes^{A, B} | No |
| Kynurenate | No | — |
| Indolactate | Yes | Yes^{A, B, C} |
| Cyclo (gly-pro) | Yes | |
| Cyclo (his-phe) | Yes^{A, B, C} | — |
| Cyclo(phe-pro) (L, D) | Yes | |
| 1-kestose | Yes^{A, B} | Yes^{A, B, C} |
| Thioproline | Yes^{A, B, C} | Yes^{A, B, C} |
| N-acetylaspartate (NAA) | Yes^{A, B} | Yes^{A} |
| Glutamine | Yes | Yes^{A, B, C} |
| Tryptophan | Yes^{A, B, C} | — |
| Cysteine | Yes^{A, B, C} | Yes^{A, B, C} |
| Pyridoxamine | Yes^{A, B, C} | Yes^{A} |
| Pyridoxamine phosphate | Yes^{A} | Yes^{A} |
| pantothenate (Vitamin B5) | Yes^{A, B, C} | — |
| pyridoxine (Vitamin B6) | Yes^{A} | — |
| 2R,3R-dihydroxybutyrate | Yes^{A, B, C} | — |
| Choline | Yes^{A, B, C} | — |
| 5-aminoimidazole-4-carboxamide | No | Yes^{A, B, C} |
| trigonelline (N′-methylnicotinate) | Yes^{A, B, C} | — |
| Mevalonolactone | Yes^{A, B, C} | — |
| Tricarballylate | No | Yes^{A} |

A—metabolite is secreted at least 2 fold greater than media control;
B—metabolite is secreted at least 3 fold greater than media control;
C—metabolite is secreted at least 5 fold greater than media control.

[0227] Strain ELA191105 was cultured individually in rich media and the supernatant analyzed for secreted metabolites. Table 4 provides an exemplary list of metabolites secreted by the strain. Unless otherwise noted, the metabolite is at least 1.5 fold greater than the media control.

TABLE 4

| METABOLITE | ELA191105 |
|---|---|
| N-acetyl-cadaverine | Yes^{A, B} |
| isovalerate (C5) | Yes^{A} |
| N-acetylisoleucine | Yes^{A, B, C} |
| Homocystine | No |
| Homocysteine | Yes^{A, B, C} |
| N-acetylcitrulline | No |
| Glucoronate | Yes^{A, B, C} |
| alpha-ketoglutarate | No |
| 5-hydroxyhexanoate | No |
| 2R,3R-dihydroxybutyrate | Yes^{A, B} |
| glycerol 3-phosphate | Yes |
| 5-aminoimidazole-4-carboxamide | Yes^{A, B, C} |
| Hypoxanthine | No |
| Guanine | No |
| Orotate | No |
| Orotidine | No |
| 5,6-dihydrouridine | Yes^{A, B, C} |
| 3-dehydroshikimate | No |
| Indolactate | Yes^{A, B, C} |
| Indoleacetate | Yes^{A, B} |
| 1-kestose | Yes^{A, B, C} |
| Thioproline | Yes^{A, B, C} |
| N-acetylaspartate (NAA) | Yes^{A} |
| Glutamine | Yes^{A, B, C} |
| Cysteine | Yes^{A, B, C} |
| Pyridoxamine | Yes^{A} |
| Pyridoxamine phosphate | Yes^{A} |
| 5-aminoimidazole-4- | Yes^{A, B, C} |
| carboxamide | |
| Tricarballylate | Yes |

A-metabolite is at least 2 fold greater than media control;
B-metabolite is at least 3 fold greater than media control;
C-metabolite is at least 5 fold greater than media control.

[0228] Strain ELA191105 was cultured individually in minimal media and rich media, and the supernatants are analyzed for secreted metabolites. An exemplary list of metabolites uniquely secreted by strain 105 is as follows: betaine^{A}, carboxyethyl-GABA^{A}, 3-methylhistidine^{A}, saccharopine, pipecolate, N,N-dimethyl-5-aminovalerate^{A,B}, N-butyryl-phenylalanine^{A}, tryptophanA, N-butyryl-leucine, 2-hydroxy-4-(methylthio)butanoic acid^{A}, S-methylcysteine^{A}, ornithine, N-methylproline^{A}, N,N,N-trimethyl-alanylproline betaine (TMAP)^{A}, N-monomethylarginine^{A}, guanidinoacetate, putrescine, cysteinylglycine^{A,B,C}, cyclo(gly-phe), tryptophylglycine, pymvate^{A,B}, mannose, N-acetylmuramateA, eicosenamide (20:1), deoxycarnitineA, 2 S,3R-dihydroxybutyrate, chiro-inositol^{A,B}, choline, glycerophosphorylcholine (GPC)^{A}, 1-palmitoyl-GPE (16:0)^{A}, 1-linoleoylglycerol (18:2), 3-hydroxy-3-methylglutarate, 3-ureidopropionate, (3′-5′)-uridylyluridine, nicotinamide riboside, trigonelline (N′-methylnicotinate), oxalate (ethanedioate)^{A}, pyridoxine (Vitamin B6), maltol, histidine betaine (hercynine), 2,6-dihydroxybenzoic acid, pentose acid, N-acetylserine^{R,A}, N-acetylthreonine^{R}, N-acetylglutamine^{R,A}, 1-methylhistidine^{R,A,B}, N-acetylhistidine^{R,A}, trans-urocanate^{R,A}, N6-acetyllysine^{R}, N-acetyl-cadaverine^{R,A,B}, N-acetylphenylalanine^{R,A}, phenyllactate (PLA)^{R,A}, 3-(4-hydroxyphenyl)lactate (HPLA)^{R,A,B}, isovalerate (C5)^{R,A,B}, N-acetylisoleucine^{R,A,B,C}, N-acetylvaline^{R,A}, N-acetylmethionine^{R}, S-adenosylmethionine (SAM)^{R}, 2-hydroxy-4-(methylthio)butanoic acid^{R}, S-methylcysteine^{R,A}, N-acetylarginine^{R}, acetylagmatine^{R,A}, glutathione, oxidized (GSSG)^{R,A}, 2-hydroxybutyrate/2—hydroxyisobutyrate^{R,A}gamma-glutamylhistidine^{R,A}, glucuronate^{R,A,B}, aconitate [cis or trans]^{R}, 2-methylcitrate^{R}, 2R,3R-dihydroxybutyrate^{R,A,B}, 5-aminoimidazole-4-carboxamide^{R,A,B,C}, N-carbamoylaspartate^{R,A}, dihydroorotate^{R}, orotidine^{R,A,B,C}, thymine^{R,A,B}, (3′-5′)-adenylylguanosine^{R,A,B,C}, nicotinamide riboside^{R}, NAD+^{R,A}, Pyridoxamine, pyridoxamine phosphate^{A} and homocitrate.

R-metabolite secreted when grown in rich media; A-metabolite is at least 2 fold greater than the two other strains; B-metabolite is at least 3 fold greater than the two other strains; C-metabolite is at least 5 fold greater than the two other strains.

[0229] The 16 S rRNA sequence of ELA191105 bacteria strain is provided below:

Full 16S-rRNA sequences
>Bacillus subtilis ELA191105 (BSUB_00009)
(SEQ ID NO: 34)
tcggagagtttgatcctggctcaggacgaacgctggcggcgtgcctaat
acatgcaagtcgagcggacagatgggagcttgctccctgatgttagcgg
cggacgggtgagtaacacgtgggtaacctgcctgtaagactgggataac
tccgggaaaccggggctaataccggatggttgtttgaaccgcatggttc
aaacataaaaggtggcttcggctaccacttacagatggacccgcggcgc
attagctagttggtgaggtaacggctcaccaaggcaacgatgcgtagc
cgacctgagagggtgatcggccacactgggactgaggcacggcccagac
tcctacgggaggcagcagtagggaatcttccgcaatggacgaaagtc
tgacggagcaacgccgcgtgagtgatgaaggttttcggatcgtaaagct
ctgttgttagggaagaacaagtaccgttcgaatagggcggtaccttgac
ggtacctaaccagaaagccacggctaactacgtgccagcagccgcggta
atacgtaggtggcaagcgttgtccggaattattgggcgtaaagggctc
gcaggcggtttcttaagtctgatgtgaaagcccccggctcaaccgggga
gggtcattggaaactggggaacttgagtgcagaagaggagagtggaat
tccacgtgtagcggtgaaatgcgtagagatgtggaggaacaccagtggc
gaaggcgactctctggtctgtaactgacgctgaggagcgaaagcgtgg
ggagcgaacaggattagataccctggtagtccacgccgtaaacgatgag
tgctaagtgttagggggtttccgccccttagtgctgcagctaacgcatt
aagcactccgcctggggagtacggtcgcaagactgaaactcaaaggaat
tgacgggggcccgcacaagcggtggagcatgtggtttaattcgaagc
aacgcgaagaaccttaccaggtcttgacatcctctgacaatcctagaga
taggacgtccccttcgggggcagagtgacaggtggtgcatggttgtcgt
cagctcgtgtcgtgagatgttgggttaagtcccgcaacgagcgcaaccc
ttgatcttagttgccagcattcagttgggcactctaaggtgactgccgg
tgacaaaccggaggaaggtggggatgacgtcaaatcatcatgcccctta
tgacctgggctacacacgtgctacaatggacagaacaaagggcagcgaa
accgcgaggttaagccaatcccacaaatctgttctcagttcggatcgca
gtctgcaactcgactgcgtgaagctggaatcgctagtaatcgcggatca
gcatgccgcggtgaatacgttcccgggccttgtacacaccgcccgtcac
accacgagagtttgtaacacccgaagtcggtgaggtaaccttttaggag
ccagccgccgaaggtgggacagatgattggggtgaagtcgtaacaaggt
agccgtatcggaaggtgcggctggatcacctccttt

### EXAMPLE 3

### Metabolite and Genome Analysis of Bacillus Strains

[0230] Metabolite analysis was conducted on strains ELA1901105 (also denoted strain 105). TABLE 5 provides analysis of the presence or absence of certain natural antibiotics/antibacterials or bacteriocins in the 105 (ELA1901105) strain.

TABLE 5

| Class | ELA191105 |
|---|---|
| 132.2; LCI | Absent |
| Lanthipeptide_class_II | Absent |
| 266.1; Amylocyclicin | Absent |
| 318.1; ComX1 | Absent |
| 216.2; Subtilosin_(Sbox) | Present |
| 492.1; Competence | Present |
| 490.1; Pumilarin | Absent |
| 225.2; UviB | Absent |
| 294.1; Plantathiazolicin_(Plantazolicin) | Absent |
| 54.1; LichenicidinVK21A1_(Lichenicidin_A1) | Absent |
| 121.1; Sporulation-killingfactor_skfA | Absent |
| 321.1; ComX4 | Absent |
| 145.1; Subtilosin_A | Absent |
| 127.1; Sublancin_168 | Absent |

[0231] Small peptides have powerful biological activities ranging from antibiotic to immune suppression. Some of these peptides are synthesized by Non Ribosomal Peptide Synthetases (NRPS) (Challis G L and Naismith J H (2004) Cur Opin Struct Biol 14(6):748-756). While the vast majority of peptide bond formation is catalyzed by ribosomes, the catalysis of peptide bond formation by NRPS is of importance and relevance. Some of the most well known examples of molecules made by NRPS illustrate the importance of NRPS systems. The antibiotic vancomycin and its analogues have very complex structures made by NRPS and associated enzymes. Indeed, almost all peptide based antibiotics are made by NRPS. Chelation of iron by bacteria is vital for their survival and is often a virulence determinant in pathogens. NRPS synthesize macrocycles such as enterobactin, which have an extraordinary high iron affinity. Cyclosporin, an immune suppressor and the potent anti tumour compound bleomycin are both made by NRPS. The molecules made by NRPS are often cyclic, have a high density of non-proteinogenic amino acids, and often contain amino acids connected by bonds other than peptide or disulfide bonds. NRPS are now known to be very large proteins and, despite the obvious complexity of the products, consist of a series of repeating enzymes fused together.

[0232] The non-ribosomal peptide synthetases are modular enzymes that catalyze synthesis of important peptide products from a variety of standard and non-proteinogenic amino acid substrates. Within a single module are multiple catalytic domains that are responsible for incorporation of a single residue. After the amino acid is activated and covalently attached to an integrated carrier protein domain, the substrates and intermediates are delivered to neighboring catalytic domains for peptide bond formation or, in some modules, chemical modification. In the final module, the peptide is delivered to a terminal thioesterase domain that catalyzes release of the peptide product. (Miller B R and Gulick A M (2016) Methods Mol Biol 1401:3-29).

[0233] The Bacillus strain 105 of use in the invention includes numerous NRPS and also predicted proteins which are expected to be synthesized by NRPS. Certain such proteins are as follows: NRPS; NRPS; NRPS,betalactone; CDPS; head_to_tail,sactipeptide; transAT-PKS,PKS-like,T3PKS,transAT-PKS-like,NRPS; terpene; terpene; T3PKS.

[0234] The presence of certain predicted proteins and secondary metabolites is indicated with the number of predicted such type proteins provided in parenthesis below in TABLE 6.

TABLE 6

| | ELA191105 |
|---|---|
| | (strain 105) |
| CDPS | Present (1) |
| LAP | — |
| NRPS | Present (2) |
| NRPS, PKS-like, T3PKS, transAT-PKS, transAT-PKS-like | Present (1) |
| NRPS, T3PKS, transAT-PKS, transAT-PKS-like | — |
| NRPS, bacteriocin | — |
| NRPS, betalactone | Present (1) |
| NRPS, betalactone, transAT-PKS | — |
| NRPS, transAT-PKS | — |
| PKS-like | — |
| T3PKS | Present (1) |
| head_to_tail, sactipeptide | Present (1) |
| lanthipeptide | — |
| terpene | Present (2) |
| transAT-PKS | — |
| transAT-PKS,transAT-PKS-like | — |
| other | Present (1) |

[0235] No plasmids were identified in the strain ELA1901105 (also denoted strain 105) by analysis of the whole genome sequences.

[0236] Further analysis of predicted antioxidant proteins from the sequence analysis of the Bacillus strains was conducted. Certain results are provided below in TABLE 7.

TABLE 7
Antioxidant prediction. Putative genes encoding
antioxidant in the genome of Bacillus subtilis strain 105

| | | B. subtilis |
|---|---|---|
| | | PTA-86 |
| | | (strain 105; |
| Description | Accession Number | BSUB105) |
| Alkyl hydroperoxide reductase C | UniRef100_P80239 | NA |
| | UniRef100_O34564 | PRESENT |
| | UniRef100_P80239 | PRESENT |
| Glutathione peroxidase BsaA | UniRef100_P40581 | NA |
| Hydroperoxy fatty acid reductase gpx1 | UniRef100_P40581 | NA |
| | UniRef100_P40581 | PRESENT |
| Organic hydroperoxide resistance | UniRef100_O34777 | NA |
| transcriptional regulator | UniRef100_O34777 | NA |
| | UniRef100_O34777 | PRESENT |
| Peroxide operon regulator | Q2G282 | NA |
| | Q2G282 | PRESENT |
| Sporulation thiol-disulfide | UniRef100_O31687 | NA |
| oxidoreductase A | UniRef100_O31687 | PRESENT |
| Superoxide dismutase [Mn] | UniRef100_P49114 | NA |
| | UniRef100_P49114 | PRESENT |
| Thiol peroxidase | UniRef100_P80864 | NA |
| | UniRef100_P80864 | PRESENT |
| Thiol-disulfide oxidoreductase ResA | UniRef100_P35160 | NA |
| | UniRef100_O31820 | NA |
| | UniRef100_O31820 | PRESENT |
| | UniRef100_P35160 | PRESENT |
| Thiol-disulfide oxidoreductase YkuV | UniRef100_O31699 | NA |
| | UniRef100_O31699 | PRESENT |
| Vegetative catalase | UniRef100_Q64405 | NA |
| | UniRef100_Q64405 | PRESENT |

[0237] Toxin or Antitoxin prediction analysis indicated that strain ELA191105 (strain 105) includes an Antitoxin EndoAI corresponding to Uniprot ID P96621 and a Endoribonuclease EndoA corresponding to Uniprot ID P96622.

[0238] Digestive enzymes include enzymes that cleave cell wall or cell membrane components, particularly of bacteria. Among these are for instance lysins which are cell wall hydrolases and often are found on and encoded by bacteriophages. The activities of lysins can be classified into two groups based on bond specificity within the peptidoglycan: glycosidases that hydrolyze linkages within the aminosugar moieties and amidases that hydrolyze amide bonds of cross-linking stem peptides. (Fischetti V A et al (2006) Nat Biotechnol 24(12):1508-11). Predicted digestive enzymes in the Bacillus strain 105 based on sequence analysis are provided in TABLE 8 below.

[0239] Strain 105 was evaluated for various other components and particularly antimicrobial resistance genes as shown below in TABLE 9.

TABLE 8
Predicted Digestive Enzymes identified in the genome of B. subtilis
PTA-86 (percent identity >50 and alignment length percent >90)

| | | B. subtilis |
|---|---|---|
| | | PTA-86 |
| | | (ELA191105/ |
| | Accession | strain |
| Gene Description | Number | 105) |
| 1,4-alpha-glucan branching enzyme GlgB | AGA22754.1 | Present |
| 50S ribosomal protein L1 | QFI56506.1 | NA |
| | QFI56506.1 | Present |
| 6-phospho-beta-glucosidase GmuD | CDG27774.1 | NA |
| | QAS06813.1 | Present |
| | QDK91913.1 | NA |
| Alpha-amylase | AIW36239.1 | NA |
| | QAV82864.1 | Present |
| | BAT21551.1 | NA |
| Alpha-galactosidase | QEK97784.1 | NA |
| | AIC99339.1 | Present |
| | QDK91116.1 | NA |
| Alpha-galacturonidase | ASB68722.1 | Present |
| Arabinoxylan arabinofuranohydrolase | AAD30363.1 | NA |
| | AAD30363.1 | Present |
| Aryl-phospho-beta-D-glucosidase BglA | CDG26179.1 | NA |
| | QAW06324.1 | Present |
| | QDK90194.1 | NA |
| Aryl-phospho-beta-D-glucosidase BglC | CDG24623.1 | NA |
| | ARV97270.1 | Present |
| Aryl-phospho-beta-D-glucosidase BglH | CDG27827.1 | NA |
| | QAS10023.1 | Present |
| ATP synthase subunit alpha | QHB16940.1 | NA |
| | QHB16940.1 | Present |
| Beta-glucanase | ATV02530.1 | NA |
| | AID00207.1 | Present |
| | AYL88759.1 | NA |
| Beta-hexosaminidase | ANB82474.1 | NA |
| | QAR91196.1 | Present |
| | QDK88534.1 | NA |
| Cephalosporin-C deacetylase | AHZ14331.1 | NA |
| | QAS06568.1 | Present |
| | QDK88655.1 | NA |
| Cortical fragment-lytic enzyme | CCP20089.1 | NA |
| | QBJ80577.1 | Present |
| | ATC51419.1 | NA |
| Cysteine synthase | AYA39814.1 | NA |
| | AYA39814.1 | Present |
| Demethyllactenocin | CDG24864.1 | NA |
| mycarosyltransferase | ARV97526.1 | Present |
| | QDK88875.1 | NA |
| Endo-1,4-beta-xylanase A | AQQ16389.1 | NA |
| | ANJ02848.1 | Present |
| | QDK91715.1 | NA |
| Endoglucanase | CDG26057.1 | NA |
| | NP_389695.1 | Present |
| | QDK90074.1 | NA |
| General stress protein A | AKF74877.1 | NA |
| | AGA22706.1 | Present |
| | QDK91887.1 | NA |
| Glucose-1-phosphate adenylyltransferase | QHA28835.1 | Present |
| Glucuronoxylanase XynC | CBL17903.1 | NA |
| | CBL17903.1 | Present |
| Glycogen phosphorylase | AIX08721.1 | Present |
| Glycogen synthase | QAW13524.1 | Present |
| Intracellular maltogenic amylase | AMR45682.1 | Present |
| L-Ala--D-Glu endopeptidase | QGH57794.1 | NA |
| | QGI53236.1 | Present |
| | QGT57119.1 | NA |
| Maltose-6′-phosphate glucosidase | QGH55793.1 | NA |
| | QGU25462.1 | Present |
| | QDK89133.1 | NA |
| Melibiose/raffinose/stachyose import | QEK97784.1 | NA |
| permease protein MelC | QEK97784.1 | Present |
| Membrane-bound lytic murein | CCP21108.1 | NA |
| transglycosylase F | ASB92721.1 | Present |
| | QDK90428.1 | NA |
| | QDK89432.1 | NA |
| N-acetyl-alpha-D-glucosaminyl | ATV01518.1 | NA |
| L-malate deacetylase 1 | AYE64850.1 | Present |
| | QEQ03843.1 | NA |
| N-acetyl-alpha-D-glucosaminyl | ASS91714.1 | NA |
| L-malate synthase | ASS91714.1 | Present |
| N-acetylglucosamine-6- | QGH58054.1 | NA |
| phosphate deacetylase | QAS09601.1 | Present |
| | QDK91560.1 | NA |
| N-acetylglucosaminyl- | ATV02313.1 | NA |
| diphosphoundecaprenol N-acetyl- | AYE66149.1 | Present |
| beta-D-mannosaminyltransferase | QDK91629.1 | NA |
| Oleandomycin glycosyltransferase | CDG26160.1 | NA |
| | CDG29153.1 | NA |
| | AIC97767.1 | Present |
| | AKN14112.1 | Present |
| | QDK90176.1 | NA |
| | QDK89494.1 | NA |
| Oligo-1,6-glucosidase | AJK66530.1 | NA |
| | ASZ62584.1 | Present |
| | AKD24292.1 | NA |
| Oligo-1,6-glucosidase 1 | QAW18252.1 | Present |
| Pectate lyase | AWG39450.1 | NA |
| | AFP43210.1 | Present |
| | QDK89071.1 | NA |
| Pectate lyase C | AIC99792.1 | Present |
| Pectin lyase | AWG40278.1 | NA |
| | AKE23786.1 | Present |
| | QDK91950.1 | NA |
| Penicillin-binding protein 1A/1B | AWG38114.1 | NA |
| | QCU15370.1 | Present |
| | QDK90466.1 | NA |
| Penicillin-binding protein 1F | CDG25272.1 | NA |
| | QCU14315.1 | Present |
| | QDK89310.1 | NA |
| Penicillin-binding protein 2D | CDG27654.1 | NA |
| | QGU22813.1 | Present |
| | QDK91796.1 | NA |
| Penicillin-binding protein 4 | AWG37355.1 | NA |
| | ASB94693.1 | Present |
| | QDK91217.1 | NA |
| | CDG30505.1 | NA |
| | CDG25227.1 | NA |
| | QAW40980.1 | Present |
| | QDK90813.1 | NA |
| | QDK89265.1 | NA |
| Peptidoglycan-N-acetylmuramic | QEQ05952.1 | NA |
| acid deacetylase PdaA | AFQ56715.1 | Present |
| Peptidoglycan-N-acetylmuramic | AIX06967.1 | Present |
| acid deacetylase PdaC | | |
| Processive diacylglycerol beta- | AKF76366.1 | NA |
| glucosyltransferase | QAV83859.1 | Present |
| | AYE64796.1 | Present |
| | QDK90264.1 | NA |
| PTS system maltose-specific | VEC47756.1 | NA |
| EIICB component | VEC47756.1 | Present |
| Pullulanase | AYA43052.1 | Present |
| putative 6-phospho-beta- | CCG51779.1 | NA |
| glucosidase | NP_391735.1 | Present |
| | QDK91899.1 | NA |
| putative esterase YxiM | AOY05484.1 | Present |
| putative glycosyltransferase | QCV96123.1 | NA |
| | QCV96123.1 | Present |
| putative glycosyltransferase YkoT | ASB41833.1 | Present |
| putative oligo-1,6-glucosidase 2 | AJK64068.1 | NA |
| | QAW02849.1 | Present |
| | AMP32821.1 | NA |
| | AHC40869.1 | NA |
| putative protein YqbO | QAW41282.1 | Present |
| putative rhamnogalacturonan | ASZ60459.1 | Present |
| acetylesterase YesY | | |
| Putative sporulation-specific | AKF76978.1 | NA |
| glycosylase YdhD | CAB12390.2 | Present |
| | NP_391282.1 | Present |
| | QDK89600.1 | NA |
| Rhamnogalacturonan acetylesterase RhgT | QFY87628.1 | Present |
| Rhamnogalacturonan endolyase YesW | QAT44941.1 | Present |
| Rhamnogalacturonan exolyase YesX | AIX06475.1 | Present |
| Trehalose-6-phosphate hydrolase | AIW36656.1 | NA |
| | NP_388662.1 | Present |
| | AVX18210.1 | NA |
| UDP-N-acetylglucosamine--N- | AMR47346.1 | Present |
| acetylmuramyl-(pentapeptide) | QDK89788.1 | NA |
| pyrophosphoryl-undecaprenol N- | | |
| acetylglucosamine transferase | | |

TABLE 9
Putative antimicrobial resistance genes identified in B. subtilis PTA-86 (strain ELA191105)
through genome analysis (percent identity >80 and percent coverage >95)

| | | % | % | Accession | |
|---|---|---|---|---|---|
| Gene product | Gene id | Coverage | Identity | number | Antibiotic Resistance |
| macrolide 2′- | mphK | 100 | 97.72 | NG_065846.1 | MACROLIDE |
| phosphotransferase | | | | | |
| MphK | | | | | |
| ABC-F type | vmlR | 100 | 98.66 | NG_063831.1 | LINCOSAMIDE; |
| ribosomal | | | | | STREPTOGRAMIN; |
| protection protein | | | | | TIAMULIN |
| VmlR | | | | | |
| rifamycin- | rphC | 99.39 | 82.18 | NG_063825.1 | RIFAMYCIN |
| inactivating | | | | | |
| phosphotransferase | | | | | |
| RphC | | | | | |
| aminoglycoside 6- | aadK | 99.77 | 98.12 | NG_047379.1 | STREPTOMYCIN |
| adenylyltransferase | | | | | |
| AadK | | | | | |
| streptothricin N- | satA_Bs | 100 | 95.78 | NG_064662.1 | STREPTOTHRICIN |
| acetyltransferase | | | | | |
| SatA | | | | | |
| tetracycline efflux | tet(L) | 100 | 100 | NG_048204.1 | TETRACYCLINE |
| MFS transporter | | | | | |
| Tet(L) | | | | | |

### Example 4

### Safety and Multi-Omics Characterization of Host-Derived Bacillus Species Strain as Potential Probiotic, Manufacturing and Live Delivery Strain

[0240] Host-derived Bacillus strains were isolated and screened for desirable probiotic properties and safety and stability as a production or live delivery strain. The phenotypic, genomic and metabolomic analyses of a B. subtilis bacteria (Bs ATCC PTA126786 (ELA191105, strain 105)), showed that the strain has promising probiotic traits and safety and stability profiles.

[0241] Microbial feed ingredients, also called direct-fed microorganisms (DFMs) or probiotics, have attracted tremendous interest as an alternative to AGPs to support improved production efficiency. Probiotics are defined as “live microorganisms that, when administered in adequate amounts, confer a health benefit on the host” (5). Probiotics are believed to exert their benefits through mechanisms such as: assisting with nutrition and digestion, competitive exclusion of pathogens, modulating the immune system and gut microbiota, improving epithelial integrity, and/or producing small molecule metabolites that are beneficial to the host (6, 7). In addition to the above probiotic effects, microorganisms used as probiotics or ingested by an animal must survive environmental and processing challenges prior to reaching their target site in the animal. This includes low acidity of the upper gastrointestinal tract (GIT), bile acid toxicity, and heat exposure during manufacture of bacteria containing feed and feed pelleting application.

[0242] Endospore-forming Bacillus spp. can offer advantages over traditional probiotic strains due to the ability of Bacillus spores to withstand hostile environments such as high temperature, desiccation, and acidic pH, resulting in increased viability during the manufacturing and feed-pelleting process, increased stability inside animals' GIT and extended product shelf-life. Bacillus strains have been widely used to support improved production parameters (8-11). Once inside the GIT, the spores germinate into metabolically active vegetative cells (12-15). Within the Bacillus genus, species commonly used are B. subtilis, B. coagulans, B. clausii, B. amyloliquefaciens, and B. licheniformis (16). Bacillus strains are also utilized and known to produce commercial enzymes, antimicrobial peptides, and small metabolites that may confer health benefits to the host by supporting improved feed digestion, suppressing undesirable organisms, and by maintaining a healthy gut microbiota and immune system (reviewed in (17)).

[0243] To fill the knowledge gap in the genomic and phenotypic characterization of Bacillus spp. DFMs, we take advantage of DNA sequencing and omics technologies for the comprehensive identification, screening, and characterization of Bacillus spp. to assess their safety and efficacy as probiotic candidates. Detailed strain characterization employing multi-omics approaches could uncover correlations between strain properties and the effects of administration on the host, underpin possible mechanisms of action of probiotic strains, identify biomolecules that could be used in place of live bacteria (i.e. peptides, enzymes, metabolites), and help to rationally design strain to maximize positive effects on the host and/or delivery of biomolecules to the host.

### Materials and Methods

[0244] Microbial strains and growth conditions—The Bacillus spp. strains were routinely grown in Lysogeny Broth (LB) and incubated at 37° C. overnight while shaking at 200 rpm. Avian pathogenic Escherichia coli (APEC) serotypes O2, O18, O78 and Clostridium perfringens NAH 1314-JP1011 were obtained from the Elanco pathogen library. Salmonella enteritica serovar Typhimurium ATCC 14028 was purchased from the American Type Culture Collection (ATCC, Manassas, VA). E. coli strains and S. Typhimurium, were routinely grown in LB, and C. perfringens was grown in anaerobic Brain Heart Infusion (BHI) broth supplemented with yeast extract (5.0 g/L) and L-cysteine (0.5 g/L). For growth in liquid culture, a colony from the respective agar plate was inoculated into a 10 mL tube containing liquid media and the tube was incubated in a shaker incubator at 37° C. and 200 rpm for E. coli and S. Typhimurium, and statically at 39° C. for C. perfringens inside a Bactron anaerobic chamber (Sheldon Manufacturing, Inc., Cornellius, OR). The anaerobic chamber contained a mixture of N2:CO2:H2 (87.5:10:2.5, v/v/v).

[0245] Vero cells growth condition—Vero cells were obtained from Elanco cell culture collection and were maintained in Opti-MEM® I reduced serum media containing 5% Fetal Bovine Serum (FBS) (Cytiva, Marlborough, MA) and Gentamicin (Opti-5-Gent) (Life Technologies, Carlsbad, CA). The serum-free cell culture medium was similarly prepared with Minimal Essential Medium with Earle's Balanced Salt Solution (MEM/EBSS), 10% fetal bovine serum (FBS), 1% non-essential amino acids and 1% L-glutamine in place of FBS. To generate wells containing 100% confluent cells for the cytotoxicity assay, Vero cells grown for two to three days were divided into a 96-well flat bottom tissue culture plate (Fisher Scientific, Waltham, MA) where each well contained 1×104 cells. The cells were then incubated on the plate for 48-72 hours inside a CO2 incubator (37° C.; % CO2 was maintained at 5±1%).

[0246] Bacillus spp. isolation and identification

[0247] Bacillus isolation—Bacillus spp. were isolated from cecal contents of healthy 30-42 day old chickens raised at poultry research farms in Arkansas, Georgia, and Indiana, USA employing a combination of a high-throughput isolation platform employing Prospector® (GALT, Inc, San Carlos, CA) following the manufacture's protocol, and a classical isolation method as described previously (22). For both approaches, isolation protocols were preceded by selection of Bacillus spores from the starting cecal contents by applying heat at 95° C. for 5 min or treatment with ethanol. For the latter, frozen cecal samples from the Elanco library preserved in BHI containing 20% glycerol were thawed and equal amounts of Tryptic Soy Broth (TSB) medium were added and mixed. An equal amount of absolute ethanol was added to the sample to a final concentration of 50% and the mixture was incubated at 30° C. for an hour. The ethanol-treated samples were then used for isolation. For Bacillus spp. isolation employing conventional methods, 10-fold serial-dilution was applied to the treated cecal samples to ensure separate colonies recovered on agar plates. Each colony was purified by three sequential passages onto agar plates.

[0248] Strain identification—For an initial strain identification, Bacillus cell lysates were sent to the TACGen genomic sequencing facility (Richmond, CA) for strain identification. The strain identities were determined by Sanger sequencing of amplified regions of a partial length of 16 S ribosomal RNA (rRNA) gene employing primers 27F (5′ AGA GTT TGA TCM TGG CTC AG 3′) and 1492R (5′ CGG TTA CCT TGT TAC GAC TT3′). The resulting 16 S rRNA sequences were then searched against the NCBI 16 S rRNA database using BLAST searches with an e-value cutoff of <10-20 and a percent sequence identity value of >95%. Strain identification of select isolates were further confirmed by ortholog analyses as described in the following section: Genome-based strain identification and comparative genomic analyses.

[0249] In vitro microorganism inhibition assay—Bacillus spp. strains were screened for their antimicrobial activity against five microorganisms, namely APEC serotypes O2, O18, O78, Salmonella Typhimurium ATCC 14028, and Clostridium perfringens NAH 1314-JP1011. The assays were modified from a protocol described in (23) and performed in duplicate.

[0250] The assays were modified from a protocol described in (113) and performed in duplicate. Briefly, 10 μl of Bacillus freezer stock was inoculated into 2 mL of 0.5× LB in a 15 mL round bottom shaker tube. The cultures were incubated at 37° C. for 48 hours while shaking at 200 rpm. For APEC strains and S. Typhimurium, 50 μl of freezer stock was inoculated into 5 mL of LB in a 15 mL round bottom shaker tube. The cultures were incubated at 37° C. overnight while shaking at 200 rpm. Once pathogens had grown overnight in liquid culture, 1.0×105 cfu/ml of the overnight culture were inoculated into freshly prepared LB soft agar (0.8% w/v) that was cooled in a water bath set to 45° C. after autoclave sterilization. 5 mL of the molten agar was aliquoted into each well of a 6-well cell culture plate (2 wells per Bacillus strain plus the negative control). The soft agar was solidified and air-dried for 3-4 hours. Onto this agar, 5 μl of 48-hour Bacillus culture were applied to the center of each well. The plates were inverted and allowed to incubate overnight at 37° C. for 24 hours and zones of inhibition were observed and recorded.

[0251] For Clostridium perfringens screening, 5 mL of molten LB agar (1.5%, w/v) were aliquoted into each well of a 6-well cell culture plate and allowed to solidify overnight. Then 5 μl of 48-hour Bacillus culture were spotted onto the center of each well. The plates were inverted and allowed to incubate overnight aerobically at 37° C. A colony of Clostridium perfringens NAH 1314-JP1011 was inoculated in liquid BYC broth an incubated overnight at 39° C. in the anaerobic chamber. Freshly prepared BYC soft agar (0.8%, w/v) was autoclaved and allowed to cool in a water bath set to 45° C. Once cooled, the overnight C. perfringens culture was inoculated into molten soft agar at 1.0×105 cfu/ml and mixed on a stir plate. 5 mL of the molten agar was aliquoted on top of each well of the 6-well cell culture plates containing Bacillus spots. As a negative control, C. perfringens-containing molten agar was poured onto LB agar without Bacillus. Once solidified, plates were inverted and allowed to incubate anaerobically overnight at 39° C. for 24 hours. Then, zones of inhibition were observed and recorded.

[0252] Enzyme activities—The β-mannanase assay was adapted from a protocol as described by Cleary, B., et. al. (24). Assays for amylase and protease activities were done following protocols in (23). β-mannanase assay was adapted from a protocol as described by Cleary, B., et. al. (114). Assays for amylase and protease followed protocols in (113). For testing β-mannanase activity, Bacillus strains were grown in 5 milliliters of LB medium in a 15 mL culture tube overnight at 37° C. while shaking at 200 rpm. Then 5 μl of 24 hour Bacillus culture were spotted in duplicate onto the center of an LB agar plate containing 100 mM CaCl2). The agar plates were incubated overnight at 37° C. Fresh soft agar containing Azo-carob Galactomannan (0.5%, w/v), agar (0.7%, w/v), dissolved in 50 mM Tris-HCl pH 7.0 buffer was autoclaved and allowed to cool in a water bath set to 45° C. Once cooled, the soft agar substrate was overlayed on to agar plates containing Bacillus colonies until each colony was surrounded by substrate. The plates were incubated overnight at 37° C. and allowed to incubate for 48 hours. The zone of clearance due to β-mannanase activity could be directly visualized and recorded.

[0253] For the amylase assay, agar plates containing the following ingredients were used (entity, g/L): Tryptone, 10, Soluble starch, 3, KH2PO4, 5, Yeast extract, 10, Noble Agar, 15. An overnight culture of Bacillus isolates in 0.5× LB was used as an inoculum. The Bacillus culture was spotted onto the above plate containing soluble starch and the inoculated plates were incubated at 37° C. for 48 hours. The zone of clearance due to amylase activity was visualized by flooding the surface of the plates with 5 mL of Gram's iodine solution.

[0254] For testing protease activity, agar plates containing the following ingredients were used (entity, g/L): skim milk, 25, noble agar, 25. An overnight culture of Bacillus isolates in 0.5× LB was used as inoculum. The Bacillus culture was spotted onto the above plate containing soluble starch and the inoculated plates were incubated at 37° C. for 24 hours. The zone of clearance due to protease activity could be directly visualized.

[0255] Cytotoxicity assay—Cytotoxicity assays of Bacillus culture supernatants were performed following the protocol described in EFSA guidelines (25). Culture supernatant of B. cereus ATCC 14579 and B. licheniformis ATCC14580 were used as positive and negative controls, respectively. Bacillus spp. strains were grown in 5 mL Brain Heart Infusion (BHI) liquid medium at 30° C. overnight. This overnight culture served as an inoculum for 5 mL fresh LB, the inoculated medium was then incubated at 30° C. for 6 hours without shaking. The expected cell density was at least 108 CFU/mL. The culture was then centrifuged at 1,700×g for 1 hour to generate cell-free culture supernatant.

[0256] 200 μL serum-free medium were added to the 100% confluent Vero cells grown on 96-well plates generated following the protocol described in Materials and Methods. The cells were then exposed to 100 μL of cell-free culture supernatant of Bacillus spp. and the mixture was incubated inside a CO2 incubator (5% v/v headspace of C02, Thermo Scientific, Waltham, MA) at 37° C. for 3 hour. The corresponding cell-free culture supernatant was used in the control wells. B. cereus and B. licheniformis were used as positive and negative controls, respectively, and 0.1% Triton-X, 100 μL was used as a positive cytotoxicity control. The assay was performed in three technical replicates with three biological replicates.

[0257] At the end of the incubation period, culture supernatants were collected by centrifugation at 300×g for 5 min. Culture supernatants from technical replicate wells were combined. Four micro liters of the culture supernatant were used for a lactate dehydrogenase assay (Sigma Aldrich, St. Louis, MO) with a total volume of 100 μL, following the protocol as described in (115). The reaction was monitored at an absorbance of 450 nm at 37° C. for 10 minutes measuring the generation of NADH from NAD+ as products from lactate dehydrogenase reaction. The percent cytotoxicity level was calculated by the following formula. % Cytotoxicity=(A460 nm sample—A460 nm media control)

$$\% Cytotoxicity = \frac{( A 460 nm sample - A 460 nm media control )}{( A 460 nm \_Triton X - A 460 nm\_ media control )}$$

(A460 nm_Triton X—A460 nm_media control)

[0258] The A450 nm value is an average of three biological replicates. A cytotoxicity percentage value higher than 20 was considered cytotoxic. The assays were repeated if cytotoxicity percentage of B. cereus, a positive control, was less than 40 or that of B. licheniformis, a negative control, was higher than 20.

[0259] Antimicrobial susceptibility assessment—Antibiotic susceptibility assays of Bacillus spp. for tetracycline, chloramphenicol, streptomycin, kanamycin, erythromycin, vancomycin, gentamycin, ampicillin, and clindamycin were performed and assessed according to an EFSA guideline for Antimicrobial resistance of the Bacillus spp. as direct fed microbials (25). Bacillus spp. strains on LB agar plates were sent to Microbial Research, Inc. (Fort Collins, CO) for analysis following protocols in compliance with Clinical Laboratory Standard Institute (CLSI) document VET01 (26). Briefly, MIC plates were prepared using cation-adjusted Mueller Hinton Broth (MHB) and the antimicrobials were 2-fold serially diluted to obtain a final concentration range of 0.06-32 μg/mL. Growth of Bacillus spp. in the presence of each of nine antimicrobials with different dilutions was monitored. Susceptibility was interpreted as the lack of Bacillus spp. growth in the presence of antimicrobial at a concentration that was lower that the cut-off values of the respective antimicrobials described in the EFSA guideline (FIG. 2A). For quality control, the following organisms were used as controls, Escherichia coli ATCC 25922, Enterococcus faecalis ATCC 29212, Pseudomonas aeruginosa ATCC 27853 and Staphylococcus aureus ATCC 29213.

### Whole Genome Sequencing, Assembly and Annotation

[0260] Genomic DNA isolation—High molecular weight genomic DNA of Bacillus spp. were extracted employing a Phenol:Chloroform:Isoamyl alcohol (PCI) method as described previously (27). Bacterial cells were harvested by centrifugation at 7,000×g for 10 min from an overnight culture of Bacillus spp. grown in 25 mL LB supplemented with 0.005% Tween 80 in 50 mL sterile Falcon tube (Fisher Scientific, Waltham, MA). The resulting cell pellet was resuspended in 0.75 mL of 1× Tris-EDTA (TE) buffer (Life Technologies, Carlsbad, CA), pH 8, containing Tris-HCl and EDTA at final concentrations of 10 and 1 mM, respectively, in a 2 mL Eppendorf tube (Fisher Scientific, Waltham, MA). To lyse the cells, Lysozyme (Sigma Aldrich, St. Louis, MO) was added at a final concentration of 7 mg/mL and the mixture was incubated at 37° C. for an hour. Then, SDS and Proteinase K (Sigma Aldrich, St. Louis, MO) were added to the mixture at final concentrations of 2% and 400 μg/mL, respectively, and the lysate was incubated at 60° C. for 1 hour. To remove RNA from the cell lysate, 10 μL of RNase (ThermoFisher Scientific, Waltham, MA) were added and the mixture was incubated at 37° C. for 30 min. An equal volume of a mixture of PCI (25:24:1, v/v/v) was added to the supernatant and was mixed by carefully inverting tubes 5-10 times rigorously. The aqueous phase containing DNA was separated from the organic phase by centrifugation at 12,000×g for 15 min, and the top aqueous layer was collected into a fresh 2 mL Eppendorf tube. An equal volume of a mixture of Chloroform:Isoamyl alcohol (24:1, v/v) was added to this aqueous phase containing DNA, and mixed by carefully inverting the tube. The mixture was centrifuged at 12,000×g for 10 min. DNA from the aqueous layer was precipitated by an addition of one tenth volume of sodium acetate (3M, pH 5.2) followed by centrifugation at 16,000×g for 20 min. The DNA pellet was washed three times with ice-cold 70% ethanol, air-dried, and resuspended in 0.5 mL 1× TE buffer.

[0261] PacBio long read genome sequencing—The bacterial genomic DNA samples were shipped on dry-ice to DNA Link, Inc. (San Diego, CA) for whole genome sequencing using PacBio RSII platform.

[0262] Briefly, 20 kb DNA fragments were generated by shearing genomic DNA using the covaris G-tube according to the manufacturer's recommended protocol (Covaris, Woburn, MA). Smaller fragments were purified by the AMpureXP bead purification system (Beckman Coulter, Brea, CA). For library preparation, 5 μg of genomic DNA were used. The SMRTbell library was constructed using SMRTbell^{T}M Template Prep Kit 1.0 (PacBio®, Menlo Park, CA). Small fragments were removed using the BluePippin Size selection system (Sage Science, Beverly, MA). The remaining DNA sample was used for large-insert library preparation. A sequencing primer was annealed to the SMRTbell template and DNA polymerase was bound to the complex using DNA/Polymerase Binding kit P6 (PacBio®, Menlo Park, CA).

[0263] Following the polymerase binding reaction, the MagBead was bound to the library complex with MagBeads Kit (PacBio®, Menlo Park, CA). This polymerase-SMRTbell-adaptor complex was loaded into zero-mode waveguides. The SMRTbell library was sequenced by 2 PacBio® SMRT cells (PacBio®, Menlo Park, CA) using the DNA sequencing kit 4.0 with C4 chemistry (PacBio®, Menlo Park, CA). A 1×240-minute movie was captured for each SMRT cell using the PacBio® RS sequencing platform.

[0264] Genome Assembly, Annotation and Features Prediction—The genome was assembled by DNA link, Inc. with HGAP.3. Genome annotation was carried out using a custom annotation pipeline by combining several prediction tools. Coding sequences, transfer RNA and transmembrane RNA were predicted and annotated using Prokka (28-30). Ribosomal binding site (RBS) prediction was carried out using RBSFinder (31). TranstermHP was used to predict Rho-independent transcription terminators (TTS) (32). Ribosomal RNA and other functional RNAs such as riboswitches and non-coding RNA was annotated with Infernal (33). Operons were predicted based on primary genome sequence information with Rockhopper v2.0.3 using default parameters (34). Insertion sequence prediction was done using ISEscan v.1.7.2.1 (40). Prophage prediction was done using PhiSpy v4.2.6 which combines similarity- and composition-based strategies (41).

[0265] Genome-based strain identification and comparative genomic analyses—Taxonomic labelling of the assembled microbial genomes was carried out using CAMITAX (35). CAMITAX is a scalable workflow that combines genome distance-, 16 S ribosomal RNA gene-, and gene homology-based taxonomic assignments with phylogenetic placement. OrthoFinder v2.3.1 (36) was used to determine orthologous relationships (37).

[0266] Phylogenetic analysis—Phylogenetic relationships of the genomes were explored with UBCG v3.0 using default settings (38). This software tool employs a set of 92 single-copy core genes commonly present in all bacterial genomes. These genes then were aligned and concatenated within UBCG using default parameters. The estimation of robustness of the nodes is done through the gene support index (GSI), defined as the number of individual gene trees, out of the total genes used, that present the same node. A maximum-likelihood phylogenetic tree was inferred using FastTree v.2.1.10 with the GTR+CAT model (39).

[0267] Patent depository of Bacillus amyloliquefaciens ATCC PTA-126784 and PTA-126785, and B. subtilis ATCC PTA-126786-Bacillus amyloliquefaciens ATCC PTA-126784 and PTA-126785, and B. subtilis ATCC PTA-126786 strains were deposited in the ATCC culture collection (Manassas, VA). For simplicity, Bacillus amyloliquefaciens ATCC PTA-126784 and PTA-126785, and B. subtilis ATCC PTA-126786 strains are referred to as Ba PTA84 and Ba PTA85, and Bs PTA86, respectively.

[0268] Global untargeted metabolomic analysis—Bacillus strains Bs PTA86, Ba PTA84, and Ba PTA85 were grown as three single strain cultures, and then were analyzed as a two-strain (Ba-PTA84 and PTA85) or three-strain (Bs-PTA86, Ba-PTA84, and Ba-PTA85) consortia in 5 mL of minimal or rich liquid media. For growth in minimal media, medium containing 1× M9 salts, and glucose at a final concentration of 0.5% (w/v) was used. Rich medium contained the following entities (g/L): peptone 30; sucrose 30; yeast extract 8; KH2PO4 4; MgSO4 1; and MnSO4 0.025. The culture was grown at 37° C. overnight. Bacillus cells were pelleted by centrifugation at 10,000×g for 10 min, cell pellets were washed three times with ice-cold PBS. The resulting cell pellets and cell-free supernatants were stored at −80C and sent to metabolon Inc. (Durham, NC) for global untargeted metabolomic profiling. Detailed description of metabolomic analysis is presented in Supplementary Methods.

[0269] In-vivo assessment of Bacillus DFM for improvement of growth performance in broiler chickens

[0270] Spore generation—Bacillus spores were generated employing a modified protocol as described in (42). Bacillus spp. was grown in a liquid Difco sporulation medium containing Nutrient Broth (BD Difco, Franklin Lakes, NJ, USA), 8.0 g/L; KCl, 1 g/L, and MgSO4·7H2 O, 0.12 g/L. The mixture was adjusted to pH 7.6 with additions of NaOH. After adjusting the pH and sterilizing the media by the use of an autoclave at 121° C., 1 mL of each of the following mineral sterile stock solutions were added to broth media, 1.0 M CaCl2), 0.01 M MnSO4, 1.0 mM FeSO4. A sterile glucose solution was also added to the medium mixture to a final concentration of 5.0 g/L. A single colony was taken from an agar plate and was inoculated into 100 mL of the sporulation medium. The culture was incubated overnight at 37° C. with shaking at 200 rpm. This culture served as a seeding culture for 1 L of liquid culture. All growth were done employing vented baffled flasks. This culture was incubated at 37° C. while shaking at 200 rpm for at least 72 hours. The presence of spores was monitored with a brightfield microscope. The spores were harvested at 17,000 rpm and washed three times with pre-chilled sterile distilled water. The spores were then resuspended in 30 mL of pre-chilled sterile distilled water and the spore suspension was mixed with irradiated ground rice hulls (Rice Hull Specialty Products, Stuttgart, AR), dried at 60° C. for 3-4 hours to eliminate vegetative cells. To determine spore inclusion in the rice hulls, 0.25 g of the material containing spores was heat treated at 90° C. for 5 min. One milliliter of water was added to the material and allowed to soak for 15-30 min. The suspension was vortexed for 30 sec and serially diluted 10-fold for colony counts on agar plates.

### Study Design

[0271] A total of 2,500 one-day-old male broiler chicks (Cobb 500) were randomly allocated to two treatment groups on Study Day (SD) 0. The control group received only the basal diet, while the treated group received the basal diet plus 1.5×105 CFU of Ba PTA84 per gram of final feed. The control group consisted of 30 pens of 50 birds per pen, and the Ba PTA84 group consisted of 20 pens of 50 birds per pen.

[0272] Birds were housed in floor pens in a single environmentally controlled room with ad libitum access to treatment diets and water. Basal diets were formulated to be iso-nutritive, and to meet or exceed the nutrient requirements recommended for broilers. Feed was issued in four study phases: Starter Phase I (SD 0-12); Grower Phase II (SD 12-26); Finisher Phase III (SD 26-35), Withdrawal Phase IV (SD 35-42). Diets did not contain antibiotics, anticoccidials or growth promoters and were fed to the birds as a mash in all phases.

[0273] Bird weights (pen weight) were measured and recorded at SD 0, 12, 26, 35 and 42. Feed issued and weighed back were recorded for each feeding phase. Bird general health, mortality and environmental temperature were recorded daily.

### Statistical Analysis

[0274] The experimental unit was the pen. All statistical analysis was conducted using the SAS® system version 9.4 (SAS Institute, Cary, NC)) and all tests were performed comparing the control group to the treated group using a one-sided test at P<0.05 level of significance.

[0275] Performance variables of interest for each feeding period and overall included: live final body weight (LFBW), average daily gain (ADG), average daily feed intake (ADFI), gain to feed efficiency (GF), feed to gain efficiency (FCR), mortality, and the European Broiler Index (EBI). These variables were calculated and evaluated for each study phase (Starter, Grower, Finisher, Withdrawal and Overall (SD 0-42)) and both adjusted for mortality and unadjusted.

Microbiome Profiling of Cecal Content from Birds Treated with Ba PTA84

[0276] DNA Extraction, Library Preparation and Sequencing—Total DNA from cecal content samples were extracted employing the Lysis and Purity kit (Shoreline Biome, Farmington, CT) following manufacturer's protocol. The resulting DNA was used as template for library preparation using Shoreline Biome's V4 16 S DNA Purification and Library Prep Kit (Shoreline Biome, Farmington, CT). Briefly, PCR amplification of the V4 region of the 16 S rRNA gene was performed using the extracted DNA and the primers 515F (5′GTGGCCAGCMGCCGCGGTAA (SEQ ID NO: 35)) and 806R (5′ GGACTACHVHHHTWTCTAAT (SEQ ID NO: 36)). The resulting amplicons were then sequenced using 2×150 bp paired-end kits on the Illumina iSeq platform. To increase diversity, PhiX 50 μM was added to a final concentration of 5% into the amplicon library.

[0277] Bioinformatic analysis—Forward and reverse reads were processed with cutadapt (v 2.5) (43) to remove primer sequences. Read pairs without primer sequences present or more than 15% primer mismatches were discarded. The DADA2 pipeline (v. 1.12.1) (44) was used to generate a count matrix of amplicon sequence variants (ASVs) across samples. Due to the short length of iSeq reads, forward and reverse reads were trimmed to a length of 110 bp and merged with DADA2's justConcatenate option. The DADA2 parameters parameters maxN=O, truncQ=2, rm.phix=TRUE and maxEE=2 were used. Taxonomic labels were assigned to each ASV using the DADA2 assignTaxonomy method and the Silva v. 138 database (45). Diversity and richness per sample were quantified from the ASV matrix using the Simpson, Shannon and Chao indices (46-48) and compared across treatments with the Mann-Whitney U test. Comparison of microbiome structures across treatments was performed using PERMANOVA and ANOSIM analysis based on the Bray-Curtis dissimilarity between samples. PERMANOVA and ANOSIM were performed using code in the scikit-bio python package (49). Principal component analysis of the Bray-Curtis dissimilarity matrix was used to analyze sample clustering according to treatment group.

[0278] Global untargeted metabolomic analysis—Metabolite analysis was performed at Metabolon, Inc. utilizing non-targeted UPLC-MS/MS approach employing a Waters ACQUITY ultra-performance liquid chromatography (Waters, Milford, MA) and a Q-Extractive high resolution/accurate mass spectrometer (Thermo Scientific, Waltham, MA) interfaced with a heated electrospray ionization (HESI-II) source and Orbitrap mass analyzer operated at 35,000 mass resolution. The samples were dried, reconstituted and aliquoted into four samples for the following analyses, a) Analysis of hydrophilic compounds employing acidic positive ion conditions with a C18 column (Waters UPLC BEH C18-2.1×100 mm, 1.7 μm) using water and methanol, containing 0.05% perfluoro pentanoic acid (PFPA) and 0.1% formic acid (FA), b) Analysis of more hydrophobic compounds employing a similar system as mentioned above except the mobile phase used was methanol, acetonitrile, water, 0.05% PFPA and 0.01% FA and was operated at an overall organic content. c) Analysis of basic negative ion employing a C18 column with methanol and water as mobile phase that contained 6.5 mM Ammonium Bicarbonate at pH 8. d) negative ionization following elution from a HILIC column (Waters UPLC BEH Amide 2.1×150 mm, 1.7 μm) using a gradient consisting of water and acetonitrile with 10 mM Ammonium Formate, pH 10.8. The MS analysis covered approximately 70-1000 m/z.

[0279] Metabolic compounds were identified by comparison to the Metabolon libraries of purified standards and recurrent unknown metabolites. The identification was based on retention index within a narrow RI window of the proposed identification, accurate mass match to the library+/−10 ppm, and the MS/MS forward and reverse scores.

[0280] Data from cell pellets and culture supernatants were analyzed separately. Raw intensity values were re-scaled for each identified metabolite by dividing them by the median intensity across samples. Missing values for a given metabolite and sample were imputed by assigning the minimum value for the metabolite across samples. The scaled and imputed data were Log10 transformed for subsequent analyses. Principal component analysis (PCA) was used to analyze the similarity of metabolic profiles between samples. For supernatant samples, secreted metabolites were identified by comparing the scaled and imputed intensities to the respective metabolites in media controls. A 1.5-fold increase in scaled intensities over media was used to define metabolites secreted. A similar 1.5-fold increase between an individual strain and the remaining 2 strains, or between strain consortia and the corresponding individual strains, was used to define uniquely secreted metabolites.

### Results

Isolation and Identification Bacillus Spp. from Healthy Animals

[0281] Bacillus spp. strains were isolated from the cecal contents and fecal materials of healthy chickens. The taxonomic identities of the isolates were determined by 16 S-rRNA amplicon sequencing. These isolates belonged to 30 different Bacillus species with the top hits of B. velezensis, B. amyloliquefaciens, B. haynesii, B. pumilus, B. subtilis, and B. licheniformis.

[0282] Due to safety considerations, Bacillus spp. isolates chosen for further screening included only those that belong to the species listed as DFMs in the Association of American Feed Control Officials, Inc. (AAFCO) Official Publication since they “were reviewed by FDA Center for Veterinary Medicine and found to present no safety concerns when used in direct-fed microbial products”(50), and to the species listed as Qualified Presumption of Safety (QPS) status according to the European Food Safety Authority (EFSA) BIOHAZ Panel (3). These were B. subtilis, B. amyloliquefaciens, B. pumilus, and B. licheniformis.

In-Vitro Screening for Probiotic Properties of Bacillus Spp. Strains

[0283] Bacillus spp. strains were tested to determine their effect on selected microorganisms and their ability to secrete selected enzymes (23). For the former, Gram-negative and Gram-positive microorganisms (E. coli O2, O18, and O78, and Clostridium perfringens NAH 1314-JP1011) and Salmonella enterica serovar Typhimurium ATCC 14028, were used. For the latter, plate-based assays for determining the secretion of amylase, protease, and β-mannanase were performed.

[0284] A total of 266 Bacillus strains were first screened against E. coli 02, and 71% of the strains showing positive E. coli 02 inhibition were selected for a second-round of assays targeting E. coli 018, then E. coli O78, S. Typhimurium and lastly C. perfringens JP1011. The top 8 Bacillus strain candidates were selected according to their cumulative inhibition scores, and selected data for included B. subtilis (Bs) isolate Bs PTA86 (ELA191105, also designated as strain 105) is provided in TABLE 10.

TABLE 10
In Vitro Pathogen Inhibition and Digestive Enzyme Activities of
Bacillus subtilis PTA86

| Pathogen inhibition and | Bs-PTA86 |
|---|---|
| digestive enzyme activities | (ELA191105/strain 105) |
| Pathogen inhibition^{a} | |
| Salmonella Typhimurium | 0 |
| ATCC 14028 | |
| Clostridium perfringens | 3 |
| JP1011 | |
| APEC O78 | 0 |
| APEC O2 | 1 |
| APEC O18 | 1 |
| Cumulative pathogen | 5 |
| inhibition Score | |
| Digestive enzymes^{b} | |
| Amylase | 2.04 |
| Protease | 1.95 |
| Beta-mannanase | 2 |
| Cumulative REA Score | 5.99 |

^{a}Pathogen inhibiton scores were assigned based on the size of clearance zone as follows, 0, no inhibition; 1, 2, 3, 4, clearance zone values of 0-0.9, 1.0-1.9, 2.0-2.9, and 3.0-4.0 mm, respectively. A clearance zone value is defined as the distance from the outer part of Bacillus colony to the end of pathogen growth inhibition zone.
^{b}Relative digestive enzyme activities were measured in Relative Enzyme Activity values (REA) that were calculated as a ratio between a diameter of clearance zone from enzyme activity and the diameter of Bacillus colony.

[0285] The cumulative inhibition score was calculated as the sum of the inhibition score values of a Bacillus strain against the five microorganisms tested. The average cumulative inhibition score was 5.5 for Bs PTA86.

[0286] The Bacillus strain candidate was evaluated for the ability to secrete enzymes. Bacillus strains are known to produce a variety of enzymes (51, 52). In vitro plate-based assays for protease, amylase, and β-mannanase activities showed that Bs PTA86 demonstrated amylase, protease, and β-mannanase activities.

Safety Assessment of Bacillus Spp. Strains

[0287] To evaluate the safety of Bacillus spp. as microbial feed ingredients, the Bacillus candidates were tested for antimicrobial susceptibility to medically relevant antimicrobials. Microbial feed ingredients should not carry or be capable of transferring antimicrobial resistance genes to other gut microbes. This is especially important in the case of medically relevant antimicrobials that are used in humans, given the rise of multidrug resistant bacteria. Antimicrobial susceptibility tests for Bacillus strain BS PTA86 showed that was susceptible to all of the tested antibiotics, specifically to each of clindamycin, chloramphenicol, erythromycin, gentamicin, kanamycin, streptomycin, tetracycline, vancomycin and ampicillin (data not shown).

[0288] To determine the potential toxicity of Bacillus strains on host cells, culture supernatants of Bacillus spp. were tested for cytotoxicity toward Vero cells according to (25). The cytotoxicity assay was performed by monitoring the lactate dehydrogenase (LDH) enzyme originated from compromised Vero cells as described in (53). The results suggested that the tested Bacillus strains were non-cytotoxic with toxicity levels far below 20%, a percentage that is considered cytotoxic according to the EFSA guidelines (data not shown). The cytotoxicity level of Bs PTA86 was the lowest among strains evaluated, 5%.

### Selection of Bacillus Spp. as Direct Fed Microbial Candidates

[0289] Based on performance on microorganism inhibition, enzymatic activities, antimicrobial susceptibility, and low toxicity against Vero cells, strain Bs PTA86 was chosen for more detailed characterization employing genomic and metabolomic approaches described in the following sections.

[0290] Untargeted Global Metabolomic Analysis of Cell Pellets and Culture Supernatants Bs PTA86

[0291] Untargeted metabolomics analysis of cell pellets and culture supernatants of Bs PTA86 was performed to assess differences in metabolite profiles. Cells were cultured in both rich and minimal media as individual strains. Named metabolites were identified in the supernatant and pellet samples, respectively. Thus, strain Bs PTA86 (ELA191105) secretes metabolites and includes intracellular metabolites that are unique versus other Bacillus strains. Details and specifics, including tablulated listings, regarding unique metabolites of ELA191105, including in comparison with other Bacillus strains is provided in U.S. Ser. No. 63/083,697 filed Sep. 25, 2020 and in U.S. Ser. No. 63/241,369 filed Sep. 7, 2021, each of which are incorporated by reference herein.

### Genome Properties of Bs PTA86

[0292] The genome of Bs PTA86 was sequenced by PacBio sequencing. The genome properties and annotation of different features are summarized in TABLE 11. The whole-genome sequences were deposited at DDBJ/ENA/GenBank under BioProject numbers PRJNA701126 and PRJNA701127. The genome sequence of strain Bs PTA 86 is included and provided in U.S. Ser. No. 63/083,697 filed Sep. 25, 2020 and in U.S. Ser. No. 63/241,369 filed Sep. 7, 2021, each of which are incorporated by reference herein. The BsPTA86 strain (ELA191105) genome nucleic acid sequence is also provided in SEQ ID NO: 1 and in SEQ ID NOs:2-6.

TABLE 11
Genome Assembly and Annotation Summary of Bacillus spp.

| | PTA-86 |
|---|---|
| | (ELA191105/strain |
| Feature | 105) |
| No. sequences | 1 |
| Total genome size (bp) | 4,089,676 |
| CDS | 4,027 |
| Miscellaneous feature | 8 |
| Mobile Elements | 2 |
| Non-coding RNA | 11 |
| Operons | 747 |
| Ribosomal RNA | 30 |
| Ribosomal binding sites | 4,026 |
| Transcription Terminators | 2,196 |
| Riboswitch | 48 |
| Transfer RNA | 86 |
| Transfer-messenger RNA | 1 |

[0293] Phylogenetic analysis of Bs PTA86—Phylogenetic relationships of the genome was explored with UBCG v3.0 which employs a set of 92 single-copy core genes commonly present in all bacterial genomes. The Bs PTA86 genome was compared against the genomes of B. amyloliquifaciens, B. velezensis and B. subtilis strains along with LactoBacillus reuterii as an outgroup (Accession numbers: AL009126, CP000560, CP002627, CP002634, CP002927, HE617159, HG514499, JMEFO1000001, CP005997, CP009748, CP009749, CP011115, LHCCO1000001, CP014471 and QVMXO1000001). Bs PTA86 showed closest relationship to Bacillus subsp. Subtilis 168 (ATCC 23857, DSM 23788)

[0294] Genome analysis Bs PTA86—The assembled genome sequence of Bacillus strain 105 was annotated for the potential probiotic properties such as enzymes, antioxidants, bacteriocins, and secondary metabolites, and for the presence of genes of potential safety concerns such as genes encoding toxins, virulence factors, and antimicrobial resistance genes. A detailed description of each of the above-mentioned features is described below.

[0295] Selected enzymes analyses—TABLE 12 illustrates the presence genes encoding selected digestive enzymes identified in the Bacillus Bs PTA86 genome. All three Bacillus genomes encode lipase, 3-phytase, alpha-amylase, endo-1,4-β xylanase A, p glucanase, β-glucanase, β-mannanase, pectin lyase, and alpha galctosidase. Bs PTA86 carried two copies of β-mannanase genes. β-mannanase catalyzes the hydrolysis of β-1,4-linkage of glucomannan releasing mannan oligosaccharide (24, 54). This enzyme along with phytase, xylanase, amylase are added as feed ingredients to improve feed digestibility (55-57). Bs PTA86 possessed pullulanase, oligo-1,6-glucosidase, and glycogen degradating enzymes such as 1,4-alpha-glucan branching enzyme.

TABLE 12

| | Bs PTA86 |
|---|---|
| Enzyme | (strain 105) |
| Lipase | Present |
| 3-phytase | Present |
| Alpha-amylase | Present |
| Endo-1,4-beta-zylanase A | Present |
| Beta-glucanase | Present |
| Beta-mannanase | Present |
| | (Multicopy) |
| Pectin lyase | Present |
| Alpha-galactosidase | Present |
| 1,4-Alpha-glucan branching | Present |
| enzyme | |
| Pullulanase | Present |
| Oligo-1,6-glucosidase 1 | Present |

[0296] Secondary metabolites—Secondary metabolite clusters accounted 12% of the genome of Bacillus Bs PTA86. TABLE 13 illustrates the respective clusters for the Bacillus Bs PTA86 genome, which encodes for 10 clusters. More than half of the clusters were contributed by biosynthetic genes for antimicrobial peptides (AMPs) (TABLE 14). The Bs PTA86 genome possessed subtilosin A, a cyclic antimicrobial peptide potent against some Gram positive and Gram negative bacteria such as Listeria monocytogenes, Enterococcus faecalis, Porphyromonas gingivalis, Klebsiella rhizophila, Streptococcus pyogenes and Shigella sonnei, Pseudomonas aeruginosa and Staphylococcus aureus (58-60). For non-ribosomally synthesized AMPs, Bs PTA 86 carries plipastatin, surfactin, bacillibactin, and bacilysin.

[0297] TABLE 14 provides a tabulation and comparison of some antimicrobial peptides and TABLE 15 provides digestive enzymes provided by the strain Bs PTA 86.

TABLE 13
Secondary Metabolites Gene Clusters of Bs PTA86

| Type | PTA |
|---|---|
| Class/Cluster* | 86 |

Bacteriocin and RiPPs class

| | |
|---|---|
| Amylocyclicin | 0 |
| ComX1 | 0 |
| LCI | 0 |
| Lanthipeptide_class_II | 0 |
| Competence | 1 |
| Subtilosin_(SboX) | 1 |

Secondary metabolite biosynthesis gene cluster

| | |
|---|---|
| CDPS | 1 |
| NRPS | 2 |
| NRPS, PKS-like, T3PKS, transAT-PKS, transAT-PKS- | 1 |
| like | |
| NRPS, T3PKS, transAT-PKS, transAT-PKS-like | 0 |
| NRPS, bacteriocin | 0 |
| NRPS, betalactone | 1 |
| NRPS, betalactone, transAT-PKS | 0 |
| NRPS, transAT-PKS | 0 |
| PKS-like | 0 |
| T3PKS | 1 |
| head_to_tail, sactipeptide | 1 |
| lanthipeptide | 0 |
| terpene | 2 |
| transAT-PKS | 0 |
| transAT-PKS, transAT-PKS-like | 0 |
| other | 1 |

*Abbreviations, RiPP, ribosomally synthesized and post-translationally modified peptides; NRPS, Non-Ribosomal Peptide Synthase; PKS, polyketide synthasePolyketide Synthase; T3PKS, type III polyketide synthase; trans-Type 3-PKS; AT-PKS, trans-acyltransferase polyketide synthase. Acyltransferase PKS.

TABLE 14
Antimicrobial peptides

| | Bs PTA86 |
|---|---|
| PEPTIDE | (strain 105) |
| Ribosomally-synthesized | |
| antimicrobial peptides | |
| Lichenicidin A | Absent |
| Circularin | Absent |
| LCI | Absent |
| Subtilosin A | Present |
| Salicylate containing AMPs | Absent |
| Non-Ribosomally-synthesized | |
| antimicrobial peptides | |
| Plipastatin | Present |
| Surfactin | Present |
| Bacillibactin | Present |
| Bacilysin | Present |
| Gramicidin/Tyrocidin | Absent |

TABLE 15
Putative digestive enzymes identified in the genome of B. subtilis PTA-85

| | Accession | B. subtilis |
|---|---|---|
| Gene Description | Number | PTA-86 |
| 1,4-alpha-glucan branching enzyme GlgB | AGA22754.1 | Present |
| 6-phospho-beta-galactosidase | QDK89482.1 | None |
| 6-phospho-beta-glucosidase GmuD | QDK91913.1 | Present |
| Alpha-amylase | BAT21551.1 | Present |
| Alpha-galactosidase | QDK91116.1 | Present |
| Alpha-galacturonidase | ASB68722.1 | Present |
| Aryl-phospho-beta-D-glucosidase BglA | QDK90194.1 | Present |
| Aryl-phospho-beta-D-glucosidase BglC | ARV97270.1 | Present |
| Aryl-phospho-beta-D-glucosidase BgIH | QAS10023.1 | Present |
| Beta-glucanase | AYL88759.1 | Present |
| Beta-glucanase | AYL88759.1 | None |
| Beta-hexosaminidase | QDK88534.1 | Present |
| Beta-mannanase | | Present |
| Cephalosporin-C deacetylase | QDK88655.1 | Present |
| Cortical fragment-lytic enzyme | ATC51419.1 | Present |
| Demethyllactenocin mycarosyltransferase | QDK88875.1 | Present |
| Endo-1,4-beta-xylanase A | QDK91715.1 | Present |
| Endoglucanase | QDK90074.1 | Present |
| Endoglucanase | CCF05300.1 | None |
| General stress protein A | QDK91887.1 | Present |
| GlcNAc-binding protein A | QEQ03549.1 | None |
| Glycogen phosphorylase | AIX08721.1 | Present |
| Glycogen synthase | QAW13524.1 | Present |
| Intracellular maltogenic amylase | AMR45682.1 | Present |
| L-Ala--D-Glu endopeptidase | QGT57119.1 | Present |
| Maltose-6′-phosphate glucosidase | QDK89133.1 | Present |
| Melibiose/raffinose/stachyose import permease protein MelC | QEK97784.1 | Present |
| Membrane-bound lytic murein transglycosylase F | QDK89432.1 | Present |
| Membrane-bound lytic murein transglycosylase F | QDK90428.1 | None |
| N-acetyl-alpha-D-glucosaminyl L-malate deacetylase 1 | QEQ03843.1 | Present |
| N-acetylglucosamine-6-phosphate deacetylase | ASB54801.1 | Present |
| N-acetylglucosamine-6-phosphate deacetylase | ASB54800.1 | None |
| N-acetylglucosaminyldiphosphoundecaprenol N-acetyl-beta-D- | QDK91629.1 | Present |
| mannosaminyltransferase | | |
| Oleandomycin glycosyltransferase | QDK89494.1 | Present |
| Oleandomycin glycosyltransferase | QDK90176.1 | Present |
| Oligo-1,6-glucosidase | AKD24292.1 | Present |
| Oligo-1,6-glucosidase 1 | QAW18252.1 | Present |
| 3-phytase | | Present |
| Pectate lyase | QDK89071.1 | Present |
| Pectate lyase C | AIC99792.1 | Present |
| Pectin lyase | QDK91950.1 | Present |
| Penicillin-binding protein 1A/1B | QDK90466.1 | Present |
| Penicillin-binding protein 1A/1B | QDK90466.1 | None |
| Penicillin-binding protein 1F | QDK89310.1 | Present |
| Penicillin-binding protein 2D | QDK91796.1 | Present |
| Penicillin-binding protein 4 | QDK91217.1 | Present |
| Peptidoglycan-N-acetylglucosamine deacetylase | QDK89265.1 | Present |
| Peptidoglycan-N-acetylglucosamine deacetylase | QDK90813.1 | None |
| Peptidoglycan-N-acetylmuramic acid deacetylase PdaA | QEQ05952.1 | Present |
| Peptidoglycan-N-acetylmuramic acid deacetylase PdaC | AIX06967.1 | Present |
| Processive diacylglycerol beta-glucosyltransferase | QAV83859.1 | Present |
| Processive diacylglycerol beta-glucosyltransferase | QDK90264.1 | Present |
| Pullulanase | AYA43052.1 | Present |
| putative 6-phospho-beta-glucosidase | QDK91899.1 | Present |
| putative esterase YxiM | AOY05484.1 | Present |
| putative oligo-1,6-glucosidase 2 | AHC40869.1 | Present |
| putative protein YqbO | QDK89544.1 | Present |
| putative rhamnogalacturonan acetylesterase YesY | ASZ60459.1 | Present |
| Putative sporulation-specific glycosylase YdhD | CAB12390.2 | Present |
| Putative sporulation-specific glycosylase YdhD | QDK89600.1 | Present |
| Rhamnogalacturonan acetylesterase RhgT | QFY87628.1 | Present |
| Rhamnogalacturonan endolyase YesW | QAT44941.1 | Present |
| Rhamnogalacturonan exolyase YesX | AIX06475.1 | Present |
| Trehalose-6-phosphate hydrolase | AVX18210.1 | Present |
| UDP-N-acetylglucosamine--N-acetylmuramyl- | QDK89788.1 | Present (2) |
| (pentapeptide)pyrophosphoryl-undecaprenol N- | | |
| acetylglucosamine transferase | | |

### Genes of Safety Concern

[0298] To search for genes encoding known virulence factors, toxins, and antimicrobial resistance (AMR), we applied a screening approach using cutoff values according to an EFSA guideline (61), sequence identity and coverage values higher than 80 and 70%, respectively. According to the analysis, genes for known virulence factors or toxins were not identified in the Bacillus strain Bs PTA86.

[0299] TABLE 16 presents genes for putative genes encoding for antimicrobial resistance (AMR). The Bs PTA86 genome carried putative genes that encoded macrolide 2′phosphotransferase (mphK), ABC—F type ribosomal protection protein (vmlR), Streptothricin-N-acetyltransferase (satA), tetracyclin efflux protein (tet(L)), aminoglycoside 6-adenylyltransferase (aadK) (29), and rifamycin-inactivating phosphotransferase (rphC). The aadK gene from B. subtilis was originally found in susceptible derivatives of Marburg 168 strains. Heterologous expression of the gene in a plasmid in E. coli resulted in resistance phenotype toward rifamycin suggesting the need for high gene copies to confer resistance (30).

TABLE 16
Putative antimicrobial resistance genes identified in B. subtilis PTA-86 (strain ELA191105)

| | Gene | % | % | Accession | |
|---|---|---|---|---|---|
| Gene product | id | Coverage | Identity | number | Antibiotic Resistance |
| macrolide 2′- | mphK | 100 | 97.72 | NG_065846.1 | Macrolide |
| phosphotransferase | | | | | |
| MphK | | | | | |
| ABC-F type ribosomal | vmlR | 100 | 98.66 | NG_063831.1 | Lincosamide; |
| protection protein | | | | | Streptogramin; |
| VmlR | | | | | Tiamulin |
| streptothricin N- | satA_Bs | 100 | 95.78 | NG_064662.1 | Streptothricin |
| acetyltransferase SatA | | | | | |
| tetracycline efflux MFS | tet(L) | 100 | 100 | NG_048204.1 | Tetracycline |
| transporter Tet(L) | | | | | |
| aminoglycoside 6- | aadK | 99.77 | 98.12 | NG_047379.1 | Streptomycin |
| adenylyltransferase | | | | | |
| AadK | | | | | |
| rifamycin-inactivating | rphC | 99.39 | 82.18 | NG_063825.1 | Rifamycin |
| phosphotransferase | | | | | |
| RphC | | | | | |

### Antioxidants, Adhesion, and Folate Biosynthesis

[0300] Genes encoding primary redox enzymes such as superoxide dismutase and catalase that scavenge reactive oxygen species were found in the three Bacillus genomes, TABLE 17. A thioredoxin system and genes for bacillithiol biosynthesis were also identified. The Bs PTA86 genome encoded for a thioredoxin reductase and a Trx for Bs PTA86. Thioredoxin systems maintain cellular redox homeostasis (62). Interestingly, despite lacking glutathione-glutaredoxin system, several genes for glutathione transport were found suggesting the potential transport of redox proteins, possibly bacillithiol, to the extracellular environment maintaining redox potential of the surroundings. Two genes for bacillithiol biosynthesis (63), bshA and B, were identified in the genome of Bs PTA86, TABLE 17.

TABLE 17
Putative genes encoding antioxidant in the genomes of Bacillus strain 105

| | | B. subtilis |
|---|---|---|
| Description | Gene id | PTA-86 |
| Superoxide dismutase [Mn] | sodA | Present |
| Superoxide dismutase-like protein | yojM | Present |
| Thiol peroxidase | tpx | Present |
| Thiol-disulfide oxidoreductase | resA_1 | Present (2) |
| Thiol-disulfide oxidoreductase YkuV | ykuV | Present |
| Thioredoxin | trxA_1 | NA |
| | trxA_2 | Present |
| Thioredoxin reductase | trxB | Present |
| Thioredoxin-like protein YdbP | ydbP | Present |
| Thioredoxin-like protein YtpP | ytpP | Present |
| Catalase | katA_1 | Present |
| Catalase HPII | katE | NA |
| | katE_2 | Present |
| Putative deferrochelatase/peroxidase EfeN | efeN | Present |
| Sporulation thiol-disulfide oxidoreductase A | stoA | NA |
| Glutathione hydrolase proenzyme | ggt | Present |
| | ggt_2 | Present |
| Glutathione hydrolase-like YwrD proenzyme | ywrD | Present |
| Glutathione transport system permease protein GsiD | gsiD | Present |
| Glutathione-independent formaldehyde | fdhA | Present |
| dehydrogenase | | |
| Glutathione-regulated potassium-efflux system | kefB | Present |
| protein KefB | | |
| Putative peroxiredoxin bcp | bcp | Present |
| Bacillithiol biosynthesis gene | BshA | Present |
| | BshB | Present (2) |
| Free methionine-R-sulfoxide reductase | msrC | Present |
| Peptide methionine sulfoxide reductase MsrA | msrA | Present |

[0301] One of the key desirable traits in a probiotic candidate is the ability to adhere to epithelial cells. The two genes identified in all three strains putatively encode proteins involved in adhesion to mucus, epithelial cells and are known to be involved in host immunomodulation and unwanted microorganism aggregation, providing stability to the strains and the ability to compete with other undesirable resident gut bacteria, thereby enabling effective colonization of the gut and exclusion of pathogens (64, 65). Two genes each encoding for elongation factor Tu and 60 kDa chaperonin involved in adhesion of Bacillus species to intestinal epithelium were identified in all three genomes.

[0302] Probiotic bacteria confer several health benefits to the host, including vitamin production. We searched for key components of folate production pathways in Bacillus strains using the Enzyme Commission (EC) numbers associated with folate biosynthetic pathway. The analysis of genome sequences of Bacillus strains identified genes involved para-aminobenzoic acid (PABA) synthesis in all three strains (TABLE 18). However, strain Ba PTA84 has a frameshift mutation in pabB gene. The enzymes necessary for chorismate conversion into PABA are present in all three Bacillus probiotic strains. Bacillus probiotic strains also contain the genes of DHPPP de novo biosynthetic pathway. Previous studies have shown that B. subtilis genome harbor all the pathways components and have been engineered for folate production (66-68).

TABLE 18
Genes Involved in Folate Biosynthetic Pathway in Probiotic Bacillus spp.

| | | EC | |
|---|---|---|---|
| Annotation | Gene | Number | PTA-86 |
| Protein AroA(G) | aroA | 5.4.99.5 | Present |
| 3-phosphoshikimate 1- | aroA1 | 2.5.1.19 | Present |
| carboxyvinyltransferase 1 | | | |
| 3-dehydroquinate synthase | aroB | 4.2.3.4 | Present |
| Chorismate synthase | aroC | 4.2.3.5 | Present |
| 3-dehydroquinate dehydratase | aroD | 4.2.1.10 | Present |
| Shikimate dehydrogenase | aroE | 1.1.1.25 | Present |
| (NADP(+)) | | | |
| Shikimate dehydrogenase | aroE_1 | 1.1.1.25 | — |
| (NADP(+)) | | | |
| Shikimate dehydrogenase | aroE_2 | 1.1.1.25 | — |
| (NADP(+)) | | | |
| Chorismate mutase AroH | aroH | 5.4.99.5 | Present |
| Shikimate kinase | aroK | 2.7.1.71 | Present |
| Aromatic amino acid transport | aroP | — | Present |
| protein AroP | | | |
| Dihydroneopterin aldolase | folB | 4.1.2.25 | Present |
| Bifunctional protein FolD protein | folD | 1.5.1.5 | Present |
| GTP cyclohydrolase 1 | folE | 3.5.4.16 | Present |
| GTP cyclohydrolase FolE2 | folE2 | 3.5.4.16 | Present |
| 2-amino-4-hydroxy-6- | | | |
| hydroxymethyldihydropteridine | folk | 2.7.6.3 | Present |
| pyrophosphokinase | | | |
| Dihydropteroate synthase | folP | 2.5.1.15 | Present |
| Dihydropteroate synthase | folP1 | 2.5.1.15 | — |
| Aminodeoxychorismate/anthranilate | | | |
| synthase component 2 | pabA | 2.6.1.85 | Present |
| Aminodeoxychorismate synthase | pabB | 2.6.1.85 | Present |
| component 1 | | | |
| Alkaline phosphatase D | phoD | 3.1.3.1 | Present |
| Alkaline phosphatase 3 | phoB | 3.1.3.2 | Present |
| Alkaline phosphatase 4 | phoA | 3.1.3.3 | Present |
| Dihydrofolate reductase type 3 | dhfrIII | 1.5.1.3 | — |

[0303] Screening for prophages, insertion sequences and transposases—Strain Bs PTA-86 was scanned for presence of mobile genetic elements such as prophages, insertion sequences (IS) and transposases. BsPTA86 has 4 transposases and 2 copies of IS21 insertion sequence.

### DISCUSSION

[0304] A clear understanding of the physiology and safety of probiotic or live delivery strains as well as their interactions with target host, and hosts' gut microbiota are essential to rationally develop the next generation of probiotics or live delivery strains with improved safety and efficacy, and increased reproducibility. Here, we employed comprehensive multi-omics, biochemical, and microbiological approaches for the selection and characterization of Bacillus spp. strains to improve growth performance in poultry.

[0305] Bacillus spp. isolates were screened for their activities to inhibit certain pathogens and ability to secrete digestive enzymes in-vitro. The best candidates were further selected based on their safety profiles (i.e. antimicrobial resistance profile and cytotoxicity level). Genomic and metabolomic analyses were performed on the select isolates to further investigate potential host-benefit properties and possible health/safety concerns. This bottom-up approach ensures selection of the best candidates at each screening step. Strains that did not meet safety criteria were not selected. Only the best candidates that met phenotypic selection criteria moved forward to the next screening step. Genomic analysis of the top Bacillus strains helped to create a link between phenotypic observations with genomic traits.

[0306] Host-adapted Bacillus strains. We expected that host-adapted Bacillus strains to exert better probiotic effects in the host environment than those isolated from other sources, thus, we targeted our isolation to those Bacillus spp. from animal GIT content or fecal samples of healthy animals (8). A higher diversity of isolates was obtained from the ethanol-treated samples compared to heat-treated samples, as reported previously (8, 22). Despite the general heat resistance feature of Bacillus spores, spore core, cortex, coat, and membrane composition determines the degree of the spores' heat resistance (10, 69, 70) resulting in different responses of spores toward heat stresses.

[0307] Desirable probiotic properties. With the continuing reduction in use of antibiotics in poultry farms, as driven by regulations, and some customer preferences, the development of microbial feed additives that support maintenance of poultry health in the face of undesirable organisms would be beneficial. Our screening results showed that Bacillus spp. controlled the growth of undesirable E. coli O2, O18, and O78, C. perfringens—and Salmonella Typhimurium. APEC strains cause collibacillosis, which is a major problem in commercial production (74, 75). Collibacillosis occurs when APEC originating from fecal materials translocate into the lung epithelium during fecal aerosolization. Thus, reducing the APEC load in feces as a potential effect of Bacillus spp. in the feed could help reduce the incidence of collibacillosis (76, 77). C. perfringens is a pathogen that causes necrotic enteritis in poultry (78) by the production of alpha oxin and NetB (79, 80). Necrotic enteritis is a multi-factorial disease that cost poultry farmers 6 billion dollar annually (81). Salmonella Typhimurium, a poultry gut commensal, is the major cause of salmonellosis in humans. This infection is facilitated by the consumption of Salmonella-containing poultry products (82, 83). The ability of Bacillus spp to supress growth of these undesirable organisms might be due to the production of AMPs (bacteriocins). Genome analysis of BsPTA86 suggested that the genome encoded distinct AMPs (TABLE 14).

[0308] Bacillus species are known to secrete host beneficial enzymes such cellulase, xylanase, amylase, protease, β-mannanase, phytase (23, 51, 84). These enzymes, when fed to animals, improve digestion of low-calorie diets or reduce intestinal inflammation by breaking down non-starch polysaccharides (NSPs). Some NSPs are anti-nutritional factors, and increase the gut content viscosity, slow down feed retention time in the gut, and thus reduce nutrient absorption (85). An accumulation of undigested NSPs can lead to the growth of pathogens that cause subclinical infection challenges (86, 87). Production of pro-inflammatory cytokines as a response to NSPs demands a significant amount of energy, which otherwise could be preserved for growth, lowering food efficiency and growth performance (reviewed in (88)). Bs PTA-86 showed comparable protease, amylase, and β-mannanase activities. These activities were supported by our genomic analysis showing that Bs possesses genes encoding for amylase, protease, β-mannanase, and phytase.

[0309] It is noteworthy that genome analyses revealed other potential benefits the Bacillus candidate for animals. Genes encoding a wide array of antioxidant proteins were identified, superoxide dismutase, catalase, thioredoxin, and methionine sulfoxide, and bacillithiol. These proteins when expressed and secreted in the GIT could provide protection toward oxidative stress (89-91). Oxidative stress occurs in the GIT when the level of free radicals generated by reactive oxygen/nitrogen species (RO/NS) is much higher than the level of antioxidant proteins for neutralization of these toxic compounds (57). This event is triggered by various factors including nutritional or environmental heat stress, or pathological factors which ultimately decrease growth performance and quality of meat and eggs (57).

[0310] Among proposed functions of probiotic bacteria are the reduction of potential pathogenic bacteria, immune modulation, removal of harmful metabolites in the intestine and/or providing bioactive or otherwise regulatory metabolites. Folate-producing probiotic bacteria enable better nutrient digestion and energy recovery. Folate-producing probiotic strains could potentially confer protection against cancer, inflammation, stress, and digestive disturbances (66, 92-95). Several studies exploring the commercial utility of probiotic strains for folate production have been reported (92, 96, 97). Genes encoding essential enzymes in the biosynthetic pathways of folate were also found in the genome of three Bacillus strains. The products of these pathways supply important cofactors which once secreted would be absorbed by the host improving health status ((92, 96, 97).

[0311] Safety profiles. In addition, Bacillus DFM candidates must have acceptable safety profiles as expected by regulatory authorities. Some Bacillus spp. are known to produce AMPs and enterotoxins that might exert deleterious effects on the host cells (25). Cytotoxicity assessment of Bacillus spp. strains suggested that Bacillus spp. did not cause cytotoxicity of Vero cells. Moreover, genome analysis of Bs PTA 86 suggested that enterotoxins and other known virulence factors were absent in the subject Bacillus spp. Another important safety criterion is that Bacillus genomes must be devoid of transferable antimicrobial resistance genotypes (100). The data showed that the tested Bacillus isolates were sensitive to the antimicrobials tested and the apparent MIC values were below the recommended cut-off values. Genomic analysis of three Bacillus spp. identified putative genes for antimicrobial resistance to tetracycline, lincosamide, and strepthrothricine. In the genome of Bs PTA86, putative genes conferring resistance to rifampicin and macrolides were found. However, these genes have been reported present in Ba and Bs isolates from the environment (101, 102), suggesting these genes may be intrinsic properties of Ba and Bs strains. Furthermore, transferable mobile genetic elements such as transposons, insertion sequences were absent in the proximity of these genes indicating the very low risk of these genes being horizontally transferred to other gut microbes pose little to no risk to public health safety.

[0312] Metabolomic analysis. Probiotic strains are also known to secrete beneficial metabolites as microbial fermentation by-products such as short chain fatty acids (SCFAs) that help with mucus secretion, mucosal epithelial integrity, immune cell regulation, and serve as energy sources for colonocytes (103, 104). To investigate the potential host beneficial metabolites secreted, we performed global untargeted metabolomic analyses of Bs PTA86. A metabolite of particular interest was 1-kestose that was identified in the culture supernatants of the strains. 1-Kestose, the smallest fructooligosaccharide (FOS), is a trisaccharide molecule composed of a glucose and two fructose residues linked by glycosidic bonds. Kestose is a prebiotic that, when consumed, enriches the growth of gut commensals such as Bifidobacteria, Lactobacillus, and Faecalibacterium prausnitzii promoting gut health (105). Thioproline, an antioxidant molecule, was identified in the culture supernatant of Bs PTA86. Thioproline was reported to inhibit carcinogenesis in humans, and is expected to act as a nitrite scavenger (106). Pyridoxine (Vitamin B6) was found in the culture supernatant of Bs PTA86. Betaine and choline were possibly secreted by Bs PTA86. These molecules are methyl donors required for the biosynthesis of acetylcholine and phosphatidylcholine, for neural transmission and cell membrane integrity, respectively (107). Betaine, when supplemented in feed, has shown improved growth performance of birds during heat stresses (108, 109). Inclusion of choline has been associated with reduced FCR in broiler chickens (110).

### REFERENCES

[0313] 1. FAO-UN (2018) The future of food and agriculture, Alternative pathways to 2050. in Supplementar Material (Food and Agriculture Organization of the United Nations).
[0314] 2. US-FDA (2013) New animal drugs and new animal drug combination products administered in or on medicated feed or drinking water of food-producing animals: recommendations for drug sponsors for voluntarily aligning product use conditions with GFI #209. (Department of Health and Human Services).
[0315] 3. EFSA Panel on Biological Hazards (BIOHAZ) et al. (2020) Update of the list of QPS-recommended biological agents intentionally added to food or feed as notified to EFSA 13: suitability of taxonomic units notified to EFSA until September 2020.
[0316] 4. P. R. Moore, Evenson, A., Luckey, T. D., McCoy, E., Elvehjem, C. A. Hart, E. B., Use of sulfasuxidine, streptothricin, and streptomycin in nutritional studies with the chick. Journal of Biological Chemistry 2, 437-441 (1946).
[0317] 5. C. Hill et al., The International Scientific Association for Probiotics and Prebiotics consensus statement on the scope and appropriate use of the term probiotic. Nature Reviews Gastroenterology & Hepatology 11, 506-514 (2014).
[0318] 6. R. Jha, R. Das, S. Oak, P. Mishra, Probiotics (Direct-Fed Microbials) in Poultry Nutrition and Their Effects on Nutrient Utilization, Growth and Laying Performance, and Gut Health: A Systematic Review. Animals (Basel) 10 (2020).
[0319] 7. A. Grant, C. G. Gay, H. S. Lillehoj, Bacillus spp. as direct-fed microbial antibiotic alternatives to enhance growth, immunity, and gut health in poultry. Avian Pathol 47, 339-351 (2018).
[0320] 8. T. M. Barbosa, C. R. Serra, R. M. La Ragione, M. J. Woodward, A. O. Henriques, Screening for Bacillus isolates in the broiler gastrointestinal tract. Appl Environ Microbiol 71, 968-978 (2005).
[0321] 9. X. Guo, D. Li, W. Lu, X. Piao, X. Chen, Screening of Bacillus strains as potential probiotics and subsequent confirmation of the in vivo effectiveness of Bacillus subtilis MA139 in pigs. Antonie Van Leeuwenhoek 90, 139-146 (2006).
[0322] 10. P. Setlow, Spores of Bacillus subtilis: their resistance to and killing by radiation, heat and chemicals. Journal of Applied Microbiology 101, 514-525 (2006).
[0323] 11. S. Shivaramaiah et al., Evaluation of Bacillus species as potential candidates for direct-fed microbials in commercial poultry. Poult Sci 90, 1574-1580 (2011).
[0324] 12. M. Bernardeau, M. J. Lehtinen, S. D. Forssten, P. Nurminen, Importance of the gastrointestinal life cycle of Bacillus for probiotic functionality. J Food Sci Technol 54, 2570-2584 (2017).
[0325] 13. J. D. Latorre et al., Evaluation of germination, distribution, and persistence of Bacillus subtilis spores through the gastrointestinal tract of chickens. Poult Sci 93, 1793-1800 (2014).
[0326] 14. T. T. Hoa et al., Fate and dissemination of Bacillus subtilis spores in a murine model. Applied and environmental microbiology 67, 3819-3823 (2001).
[0327] 15. G. Casula, S. M. Cutting, Bacillus probiotics: spore germination in the gastrointestinal tract.

[0328] Applied and environmental microbiology 68, 2344-2352 (2002).
[0329] 16. S. Mingmongkolchai, W. Panbangred, Bacillus probiotics: an alternative to antibiotics for livestock production. J Appl Microbiol 124, 1334-1346 (2018). 17. A. Q. Grant, C. G. Gay, H. S. Lillehoj, Bacillus spp. as direct-fed microbial antibiotic alternatives to enhance growth, immunity, and gut health in poultry. Avian Pathology 47, 339-351 (2018).
[0330] 18. Y. Ma et al., Supplemental Bacillus subtilis DSM 32315 manipulates intestinal structure and microbial composition in broiler chickens. Sci Rep 8, 15358 (2018).
[0331] 19. J. S. Weese, H. Martin, Assessment of commercial probiotic bacterial contents and label accuracy. Can Vet J 52, 43-46 (2011).
[0332] 20. J. S. Weese, Microbiologic evaluation of commercial probiotics. J Am Vet Med Assoc 220, 794-797 (2002).
[0333] 21. D. H. Green et al., Characterization of two Bacillus probiotics. Appl Environ Microbiol 65, 4288-4291 (1999).
[0334] 22. J. R. Koransky, S. D. Allen, V. R. Dowell, Use of ethanol for selective isolation of sporeforming microorganisms. Applied and Environmental Microbiology 35, 762-765 (1978).
[0335] 23. J. D. Latorre et al., Evaluation and Selection of Bacillus Species Based on Enzyme Production, Antimicrobial Activity, and Biofilm Synthesis as Direct-Fed Microbial Candidates for Poultry. Front Vet Sci 3, 95 (2016).
[0336] 24. B. V. McCleary, A simple assay procedure for β-d-mannanase. Carbohydrate Research 67, 213-221 (1978).
[0337] 25. G. R. EFSA Panel on Additives and Products or Substances used in Animal Feed (FEEDAP), Gabriele Aquilina, Giovanna Azimonti, Vasileios Bampidis, Maria de Lourdes Bastos, Georges Bories, Andrew Chesson, Pier Sandro Cocconcelli, Gerhard Flachowsky, Jürgen Gropp, Boris Kolar, Maryline Kouba, Marta López-Alonso, Secundino López Puente, Alberto Mantovani, Baltasar Mayo, Fernando Ramos, Maria Saarela, Roberto Edoardo Villa, Robert John Wallace, Pieter Wester, Boet Glandorf, Lieve Herman, Sirpa KArenlampi, Jaime Aguilera, Montserrat Anguita, Rosella Brozzi, Jaume Galobart (2018) Guidance on the characterisation of microorganisms used as feed additives or as production organisms. (EFSA (European Food Safety Authority)).
[0338] 26. G. L. S. f. a. H. World (2021) Performance Standards for Antimicrobial Susceptibility Testing. (CLSI), p 352.
[0339] 27. J. Rao et al., Tn2008-driven carbapenem resistance in Acinetobacter baumannii isolates from a period of increased incidence of infections in a Southwest Virginia hospital (USA). J Glob Antimicrob Resist 12, 79-87 (2018).
[0340] 28. D. Hyatt et al., Prodigal: prokaryotic gene recognition and translation initiation site identification. BMC Bioinformatics 11, 119 (2010).
[0341] 29. D. Laslett, B. Canback, ARAGORN, a program to detect tRNA genes and tmRNA genes in nucleotide sequences. Nucleic Acids Res 32, 11-16 (2004).
[0342] 30. T. Seemann, Prokka: rapid prokaryotic genome annotation. Bioinformatics 30, 2068-2069 (2014).
[0343] 31. B. E. Suzek, M. D. Ermolaeva, M. Schreiber, S. L. Salzberg, A probabilistic method for identifying start codons in bacterial genomes. Bioinformatics 17, 1123-1130 (2001).
[0344] 32. C. L. Kingsford, K. Ayanbule, S. L. Salzberg, Rapid, accurate, computational discovery of Rho-independent transcription terminators illuminates their relationship to DNA uptake. Genome Biol 8, R22 (2007).
[0345] 33. E. P. Nawrocki, D. L. Kolbe, S. R. Eddy, Infernal 1.0: inference of RNA alignments. Bioinformatics 25, 1335-1337 (2009).
[0346] 34. B. Tjaden, A computational system for identifying operons based on RNA-seq data. Methods. 176, 62-70 (2020).
[0347] 35. A. Bremges, A. Fritz, A. C. McHardy, CAMITAX: Taxon labels for microbial genomes. GigaScience 9 (2020).
[0348] 36. D. M. Emms, S. Kelly, OrthoFinder: phylogenetic orthology inference for comparative genomics. Genome Biol 20, 238 (2019).
[0349] 37. E. W. Sayers et al., Database resources of the National Center for Biotechnology Information. Nucleic Acids Res 49, D10-d17 (2021).
[0350] 38. S. I. Na et al., UBCG: Up-to-date bacterial core gene set and pipeline for phylogenomic tree reconstruction. J Microbiol 56, 280-285 (2018).
[0351] 39. M. N. Price, P. S. Dehal, A. P. Arkin, FastTree 2—approximately maximum-likelihood trees for large alignments. PLoS One 5, e9490 (2010).
[0352] 40. Z. Xie, H. Tang, ISEScan: automated identification of insertion sequence elements in prokaryotic genomes. Bioinformatics 33, 3340-3347 (2017).
[0353] 41. S. Akhter, R. K. Aziz, R. A. Edwards, PhiSpy: a novel algorithm for finding prophages in bacterial genomes that combines similarity- and composition-based strategies. Nucleic Acids Res 40, e126 (2012).
[0354] 42. W. N. P. Setlow, Molecular Biological Methods for Bacillus. C. H. S. Cutting, Ed. (John Wiley, New York, 1990).
[0355] 43. M. Martin, Cutadapt removes adapter sequences from high-throughput sequencing reads. 2011 17, 3 (2011).
[0356] 44. B. J. Callahan et al., DADA2: High-resolution sample inference from Illumina amplicon data. Nat Methods 13, 581-583 (2016).
[0357] 45. P. Yilmaz et al., The SILVA and “All-species Living Tree Project (LTP)” taxonomic frameworks. Nucleic acids research 42, D643-D648 (2014).
[0358] 46. E. H. Simpson, Measurement of Diversity. Nature 163, 688-688 (1949).
[0359] 47. C. E. Shannon, The mathematical theory of communication. 1963. MD Comput 14, 306-317 (1997).
[0360] 48. A. Chao, Nonparametric Estimation of the Number of Classes in a Population. Scandinavian Journal of Statistics 11, 265-270 (1984).
[0361] 49. Anonymous (http://scikit-bio.org/.
[0362] 50. The Association of American Feed Control Officials, Inc., 2021 Official Publication (FASS Inc., Champaign, IL).
[0363] 51. I. Danilova, M. Sharipova, The Practical Potential of Bacilli and Their Enzymes for Industrial Production. Frontiers in Microbiology 11 (2020).
[0364] 52. F. J. Contesini, R. R. d. Melo, H. H. Sato, An overview of Bacillus proteases: from production to application. Critical Reviews in Biotechnology 38, 321-334 (2018).
[0365] 53. A. Fagerlund, T. Lindbdck, A. K. Storset, P. E. Granum, S. P. Hardy, Bacillus cereus Nhe is a pore-forming toxin with structural and functional properties similar to the ClyA (HlyE, SheA) family of haemolysins, able to induce osmotic lysis in epithelia. Microbiology (Reading) 154, 693-704 (2008).
[0366] 54. M. Saeed et al., The Role of 8-Mannanase (Hemicell) in Improving Poultry Productivity, Health and Environment. Brazilian Journal of Poultry Science 21 (2019).
[0367] 55. H. Fayek, M. Abou El-Ella, M. Attia, Y. Mady (1995) Evaluation of using some feed additives in layer diets. in Sci. Conf. Anim. Nutr, pp 313-321.
[0368] 56. Y. Zhou, Z. Jiang, D. Lv, T. Wang, Improved energy-utilizing efficiency by enzyme preparation supplement in broiler diets with different metabolizable energy levels. Poult Sci 88, 316-322 (2009).
[0369] 57. K. Sherif, Performance of broiler chicks fed plant protein diets supplemented with commercial enzymes. Journal of Animal and Poultry Production 34, 2819-2834 (2009).
[0370] 58. K. Babasaki, T. Takao, Y. Shimonishi, K. Kurahashi, Subtilosin A, a new antibiotic peptide produced by Bacillus subtilis 168: isolation, structural analysis, and biogenesis. J Biochem 98, 585-603 (1985).
[0371] 59. C. E. Shelburne et al., The spectrum of antimicrobial activity of the bacteriocin subtilosin A. Journal of Antimicrobial Chemotherapy 59, 297-300 (2007).
[0372] 60. T. Stein, S. Diisterhus, A. Stroh, K. D. Entian, Subtilosin production by two Bacillus subtilis subspecies and variance of the sbo-alb cluster. Appl Environ Microbiol 70, 2349-2353 (2004).
[0373] 61. E. F. S. A. (EFSA), EFSA statement on the requirements for whole genome sequence analysis of microorganisms intentionally used in the food chain. EFSA Journal, 1-15 (2021).
[0374] 62. Y. Meyer, B. B. Buchanan, F. Vignols, J.-P. Reichheld, Thioredoxins and Glutaredoxins: Unifying Elements in Redox Biology. Annual Review of Genetics 43, 335-367 (2009).
[0375] 63. A. Gaballa et al., Biosynthesis and functions of bacillithiol, a major low-molecular-weight thiol in Bacilli. Proc Natl Acad Sci USA 107, 6482-6486 (2010).
[0376] 64. H. Antelmann, C. Scharf, M. Hecker, Phosphate starvation-inducible proteins of Bacillus subtilis: proteomics and transcriptional analysis. J Bacteriol 182, 4478-4490 (2000).
[0377] 65. B. Sfnchez, P. Bressollier, M. C. Urdaci, Exported proteins in probiotic bacteria: adhesion to intestinal surfaces, host immunomodulation and molecular cross-talking with the host. FEMS Immunology & Medical Microbiology 54, 1-17 (2008).
[0378] 66. T. Zhu et al., Engineering of Bacillus subtilis for enhanced total synthesis of folic acid. Appl Environ Microbiol 71, 7122-7129 (2005).
[0379] 67. V. de Crecy-Lagard, Variations in metabolic pathways create challenges for automated metabolic reconstructions: Examples from the tetrahydrofolate synthesis pathway. Comput Struct Biotechnol J 10, 41-50 (2014).
[0380] 68. A. R. Salem, J. R. Pattison, M. A. Foster, Folic acid and the methylation of homocysteine by Bacillus subtilis. Biochem J 126, 993-1004 (1972).
[0381] 69. S. Brul et al., Challenges and advances in systems biology analysis of Bacillus spore physiology; molecular differences between an extreme heat resistant spore forming Bacillus subtilis food isolate and a laboratory strain. Food Microbiology 28, 221-227 (2011).
[0382] 70. E. M. Berendsen, M. H. Zwietering, O. P. Kuipers, M. H. J. Wells-Bennik, Two distinct groups within the Bacillus subtilis group display significantly different spore heat resistance properties. Food Microbiology 45, 18-25 (2015).
[0383] 71. F. Van Immerseel, J. I. Rood, R. J. Moore, R. W. Titball, Rethinking our understanding of the pathogenesis of necrotic enteritis in chickens. Trends Microbiol 17, 32-36 (2009).
[0384] 72. K. Grave, M. C. Kaldhusdal, H. Kruse, L. M. Harr, K. Flatlandsmo, What has happened in norway after the ban of avoparcin? Consumption of antimicrobials by poultry. Prev Vet Med 62, 59-72 (2004).
[0385] 73. L. Hughes, P. Hermans, K. Morgan, Risk factors for the use of prescription antibiotics on UK broiler farms. J Antimicrob Chemother 61, 947-952 (2008).
[0386] 74. F. Dziva, M. P. Stevens, Colibacillosis in poultry: unravelling the molecular basis of virulence of avian pathogenic Escherichia coli in their natural hosts. Avian Pathol 37, 355-366 (2008).
[0387] 75. M. Mellata, Human and avian extraintestinal pathogenic Escherichia coli: infections, zoonotic risks, and antibiotic resistance trends. Foodborne Pathog Dis 10, 916-932 (2013).
[0388] 76. H. Duan et al., Transmission identification of Escherichia coli aerosol in chicken houses to their environments using ERIC-PCR. Sci China C Life Sci 51, 164-173 (2008).
[0389] 77. Y. C. Chien, C. J. Chen, T. H. Lin, S. H. Chen, Y. C. Chien, Characteristics of microbial aerosols released from chicken and swine feces. J Air Waste Manag Assoc 61, 882-889 (2011).
[0390] 78. K. K. Cooper, J. G. Songer, Necrotic enteritis in chickens: A paradigm of enteric infection by Clostridium perfringens type A. Anaerobe 15, 55-60 (2009).
[0391] 79. A. L. Keyburn et al., NetB, a new toxin that is associated with avian necrotic enteritis caused by Clostridium perfringens. PLoS Pathog 4, e26 (2008).
[0392] 80. A. L. Keyburn et al., Alpha-toxin of Clostridium perfringens is not an essential virulence factor in necrotic enteritis in chickens. Infect Immun 74, 6496-6500 (2006).
[0393] 81. B. Wade, A. Keyburn, The true cost of necrotic enteritis. World Poult 31, 16-17 (2015).
[0394] 82. M. B. Batz, S. Hoffmann, J. G. Morris, Jr., Ranking the disease burden of 14 pathogens in food sources in the United States using attribution data from outbreak investigations and expert elicitation. J Food Prot 75, 1278-1291 (2012).
[0395] 83. S. L. Foley, A. M. Lynne, Food animal-associated Salmonella challenges: pathogenicity and antimicrobial resistance. J Anim Sci 86, E173-187 (2008). 84. S. Singh, B. K. Bajaj, Bioprocess optimization for production of thermoalkali-stable protease from Bacillus subtilis K-1 under solid-state fermentation. Preparative Biochemistry & Biotechnology 46, 717-724 (2016).
[0396] 85. A. Raza, S. Bashir, R. Tabassum, An update on carbohydrases: growth performance and intestinal health of poultry. Heliyon 5, e01437-e01437 (2019).
[0397] 86. M. Kaldhusdal, Necrotic enteritis as affected by dietary ingredients. World Poultry 16, 42-43 (2000).
[0398] 87. F. Van Immerseel et al., Clostridium perfringens in poultry: an emerging threat for animal and public health. Avian Pathol 33, 537-549 (2004).
[0399] 88. G. Cardoso Dal Pont, M. Farnell, Y. Farnell, M. H. Kogut, Dietary Factors as Triggers of Low-Grade Chronic Intestinal Inflammation in Poultry. Microorganisms 8, 139 (2020).
[0400] 89. Y. Wang et al., Bacillus amyloliquefaciens SC06 alleviates the oxidative stress of IPEC-1 via modulating Nrf2/KeapI signaling pathway and decreasing ROS production. Appl Microbiol Biotechnol 101, 3015-3026 (2017).
[0401] 90. A. Abudabos, A. Alyemni, H. Zakaria, Effect of Two Strains of Probiotics on the Antioxidant Capacity, Oxidative Stress, and Immune Responses of Salmonella-Challenged Broilers. Brazilian Journal of Poultry Science 18, 175-180 (2016).
[0402] 91. T. Inatomi, K. Otomaru, Effect of dietary probiotics on the semen traits and antioxidative activity of male broiler breeders. Scientific Reports 8, 5874 (2018).
[0403] 92. M. Rossi, A. Amaretti, S. Raimondi, Folate production by probiotic bacteria. Nutrients 3, 118-134 (2011).
[0404] 93. J. Zhang et al., Screening of folate-producing lactic acid bacteria and modulatory effects of folate-biofortified yogurt on gut dysbacteriosis of folate-deficient rats. Food Funct 11, 6308-6318 (2020).
[0405] 94. C. S. Fuchs et al., The Influence of Folate and Multivitamin Use on the Familial Risk of Colon Cancer in Women. Cancer Epidemiology Biomarkers &amp; Prevention 11, 227-234 (2002).
[0406] 95. E. White, J. S. Shannon, R. E. Patterson, Relationship between vitamin and calcium supplement use and colon cancer. Cancer Epidemiol Biomarkers Prev 6, 769-774 (1997).
[0407] 96. M. Schallmey, A. Singh, O. P. Ward, Developments in the use of Bacillus species for industrial production. Can J Microbiol 50, 1-17 (2004).
[0408] 97. U. Sauer, D. C. Cameron, J. E. Bailey, Metabolic capacity of Bacillus subtilis for the production of purine nucleosides, riboflavin, and folic acid. Biotechnology and Bioengineering 59, 227-238 (1998).
[0409] 98. F. M. Asrar, D. L. O'Connor, Bacterially synthesized folate and supplemental folic acid are absorbed across the large intestine of piglets. J Nutr Biochem 16, 587-593 (2005).
[0410] 99. L. H. Duc, H. A. Hong, T. M. Barbosa, A. O. Henriques, S. M. Cutting, Characterization of Bacillus probiotics available for human use. Applied and environmental microbiology 70, 2161-2171 (2004).
[0411] 100. V. Ciorba, A. Odone, L. Veronesi, C. Pasquarella, C. Signorelli, Antibiotic resistance as a major public health concern: epidemiology and economic impact. Ann Ig 27, 562-579 (2015).
[0412] 101. D. B. Adimpong et al., Antimicrobial susceptibility of Bacillus strains isolated from primary starters for African traditional bread production and characterization of the bacitracin operon and bacitracin biosynthesis. Appl Environ Microbiol 78, 7903-7914 (2012).
[0413] 102. R. W. Phelan et al., Tetracycline resistance-encoding plasmid from Bacillus sp. strain #24, isolated from the marine sponge Haliclona simulans. Appl Environ Microbiol 77, 327-329 (2011).
[0414] 103. L. R. Lopetuso, F. Scaldaferri, V. Petito, A. Gasbarrini, Commensal Clostridia: leading players in the maintenance of gut homeostasis. Gut pathogens 5, 1-8 (2013).
[0415] 104. H. M. Hamer et al., Review article: the role of butyrate on colonic function. Aliment Pharmacol Ther 27, 104-119 (2008).
[0416] 105. J. A. Patterson, J. I. Orban, A. L. Sutton, G. N. Richards, Selective enrichment of Bifidobacteria in the intestinal tract of broilers by thermally produced kestoses and effect on broiler performance. Poult Sci 76, 497-500 (1997).
[0417] 106. J. A. Patterson et al., Thioproline formation as a driver of formaldehyde toxicity in Escherichia coli. BiochemJ 477, 1745-1757 (2020).
[0418] 107. R. R. Zempleni J, McCormick D B, Suttie J W, Handbook of vitamins. (CRC Press, Boca Raton (FL), ed. 4th, 2007).
[0419] 108. W. Liu et al., Effects of Dietary Betaine on Growth Performance, Digestive Function, Carcass Traits, and Meat Quality in Indigenous Yellow-Feathered Broilers under Long-Term Heat Stress. Animals (Basel) 9 (2019).
[0420] 109. S. He, S. Zhao, S. Dai, D. Liu, S. G. Bokhari, Effects of dietary betaine on growth performance, fat deposition and serum lipids in broilers subjected to chronic heat stress. Anim Sci J 86, 897-903 (2015).
[0421] 110. G. S. Santiago et al., Dietary choline affects field performance and broiler leg deviations. Livestock Science 240, 104127 (2020).
[0422] 111. Y. Shang, S. Kumar, B. Oakley, W. K. Kim, Chicken Gut Microbiota: Importance and Detection Technology. Front Vet Sci 5, 254 (2018).
[0423] 112. A.-R. Al-Fataftah, A. Abdelgader, Effects of dietary Bacillus subtilis on heat-stressed broilers performance, intestinal morphology and microflora composition. Animal Feed Science and Technology 198, 279-285 (2014).
[0424] 113. J. D. Latorre et al., Evaluation and Selection of Bacillus Species Based on Enzyme Production, Antimicrobial Activity, and Biofilm Synthesis as Direct-Fed Microbial Candidates for Poultry. Front Vet Sci 3, 95 (2016).
[0425] 114. B. V. McCleary, A simple assay procedure for β-d-mannanase. Carbohydrate Research 67, 213-221 (1978).
[0426] 115. G. R. EFSA Panel on Additives and Products or Substances used in Animal Feed (FEEDAP), Gabriele Aquilina, Giovanna Azimonti, Vasileios Bampidis, Maria de Lourdes Bastos, Georges Bories, Andrew Chesson, Pier Sandro Cocconcelli, Gerhard Flachowsky, Jürgen Gropp, Boris Kolar, Maryline Kouba, Marta López-Alonso, Secundino López Puente, Alberto Mantovani, Baltasar Mayo, Fernando Ramos, Maria Saarela, Roberto Edoardo Villa, Robert John Wallace, Pieter Wester, Boet Glandorf, Lieve Herman, Sirpa KArenlampi, Jaime Aguilera, Montserrat Anguita, Rosella Brozzi, Jaume Galobart (2018) Guidance on the characterisation of microorganisms used as feed additives or as production organisms. (EFSA (European Food Safety Authority)).

### Example 5

[0427] Bacillus strain 105 (BSUB105; PTA-126786 or PTA-86) was analysed and certain classes of genes or secondary metabolite pathways unique to the strain identified. Some results are provided in the earlier examples and tables, such as bacteriocin predictions, secondary metabolites, carbohydrate metabolizing ezymes. Unique proteins (predicted proteins for which an equivalent or homologous protein encoding gene is not identified by identity searches in other compared Bacillus strains) are predicted based on strain sequence comparisons and assessment of gene protein sequences for Bacillus subtilis 105 (BSUB105; PTA-126786 or PTA-86). Strain 105 includes 4 subtilosin genes, pullulanase (which helps break down branched chain carbohydrates to simple carbohydrates), cyclodextrin-binding protein, 9 sporulation related genes, beta-galactosidase YesZ and GanA genes, oxidoreductase YjmC. Unique genes encoded based on the genome sequence of strain Bs PTA 86 are included and provided in U.S. Ser. No. 63/083,697 filed Sep. 25, 2020 and in U.S. Ser. No. 63/241,369 filed Sep. 7, 2021, each of which are incorporated by reference herein.

### Example 6

### Application of B. Subtilis Strain 105 as a Live Delivery Platform and Production System

[0428] Bacillus subtilis strain 105, also denoted ELA19105 (PTA-126786) has been selected and implemented as a useful and applicable strain for development and use in food-grade and pharmaceutical protein production.

[0429] A comparison between Bacillus subtilis strain 105, also denoted ELA19105 (PTA-126786) and B. subtilis strain 168 was conducted. Genome analysis and comparison showed that the S. sub 168 genome includes 1109 genes, relative to 1681 reactions, 1376 metabolites, 243 exchanges and 2 compartments. The B. subtilis strain 105 (ELA191105) genome includes 1077 genes, relative to 1462 reactions, 1253 metabolites, 153 exchanges and 2 compartments.

[0430] Metabolic genes unique to strain 105 versus strain 168, particularly their encoded proteins, are indicated below in TABLE 19.

TABLE 19
metabolic genes unique to strain B. subtilis 105

| ID Number | | |
|---|---|---|
| Internal | PROTEIN | EC NUMBER |
| JS609_00401 | 4′′′-phosphopantetheinyl transferase Sfp | EC:2.7.8.7 |
| JS609_00409 | Protein BsdD | EC:4.1.4.61 |
| JS609_00458 | 5-oxoprolinase subunit | EC:3.5.2.9 |
| JS609_00545 | Fatty acid desaturase | EC:1.14.19.- |
| JS609_00559 | Ornithine lipid N-methyltransferase | EC:2.1.1.344 |
| JS609_00561 | Sensor histidine kinase RscC | EC:2.7.13.3 |
| JS609_00883 | Phosphatidylglycerol lysyltransferase | EC:2.3.2.3 |
| JS609_01398 | Putative phosphoserine phosphatase | EC:3.1.3.3 |
| JS609_02073 | Putative N-acetyl-alpha-D-glucosaminyl | EC:3.5.1.- |
| | L-malate deacetylase | |
| JS609_02535 | Putative quinone oxidoreductase YhfP | EC:1.6.5.- |
| JS609_02536 | L-threonine 3-dehydrogenase | EC:1.1.1.103 |
| JS609_02539 | N-ethylmaleimide reductase | EC:1.3.1.- |
| JS609_02540 | Putative non-heme bromoperoxidase | EC:1.11.1.18 |
| | BpoC | |
| JS609_02543 | 3-oxoacyl-[acyl-carrier-protein] synthase | EC:2.3.1.179 |
| JS609_02569 | Mannan endo-1,4-beta-mannosidase | EC:3.2.1.78 |
| JS609_02702 | Holliday junction ATP_dependent DNA | EC:3.6.4.12 |
| | helicase RuvB | |
| JS609_03194 | Sensor histidine kinase ComP | EC:2.7.13.3 |
| JS609_03320 | Oligoendopeptidase F, plasmid | EC:3.4.24.- |
| JS609_03553 | N(G), N(G)-dimethylarginine | EC:3.5.3.18 |
| | dimethylaminohydrolase | |
| JS609_03556 | ADP-ribose pyrophophatase | EC:3.6.1.13 |
| JS609_03557 | Pyrimidine 5′-nucleotidase YjjG | EC:3.1.3.5 |
| JS609_03563 | Vitamin B12 import ATP-binding protein | EC:7.6.2.8 |
| | BtuD | |
| JS609_03610 | Teichoic acid poly(glycerol phosphate) | EC:2.7.8.12 |
| | polymerase | |
| JS609_03830 | dTDP-4-dehydrorhamnose 3,5-epimerase | EC:5.1.3.13 |
| JS609_03973 | Dihydroanticapsin 7-dehydrogenase | EC:1.1.1.385 |
| JS609_03980 | Ribonuclease YxiD | EC:3.1.-.- |
| JS609_04080 | Sensor histidine kinase RscC | EC:2.7.13.3 |

[0431] The Bacillus subtilis strain 105, also denoted ELA19105 (PTA-126786) provides a useful and applicable strain for development and use in food-grade and pharmaceutical protein production and as a live delivery platform to deliver and produce useful biomolecules and proteins, including homologous and heterologous proteins in an animal host.

TABLE 20
Developing and Applying Bacillus subtilis #105 as a production and live delivery strain

| | Requirement | Status | Remarks |
|---|---|---|---|
| SAFETY | Antimicrobial | Susceptible to all EFSA | The genome is free of antimicrobial |
| | resistance | recommended, clinically | resistance genes |
| | | relevant antimicrobials | |
| | Cytotoxicity | No cytotoxicity was detected | |
| | | using Vero cells | |
| | Virulence | No virulence factors and | This consistent with the cytotoxicity |
| | factors & | toxins were identified | data |
| | toxins | | |
| | Biogenic | No biogenic amines were | Bacillus species generally do not |
| | amines | identified. | produce biogenic amines. |
| GROWTH | Growth- | Grows well under laboratory | Minimal media available for Bacillus |
| & SCALE- | laboratory | conditions; grows in M9 | subtilis #168 and works for B. subtilis |
| UP | scale | media; does not | #105 growth as well. |
| | | demomnstrate complex | M9 media which is a minimal media is |
| | | nutritional requirements | suitable. For growth in minimal media, |
| | | | medium containing 1X M9 salts, and |
| | | | glucose at a final concentration of 0.5% |
| | | | (w/v) was used. |
| | | | Rich medium for growth contains the |
| | | | following entities (g/L): peptone 30; |
| | | | sucrose 30; yeast extract 8; KH₂PO₄ 4; |
| | | | MgSO₄ 1; and MnSO₄ 0.025. |
| | | | 1X M9 salts (per liter): |
| | | | 7 g Na₂HPO₄•7H₂O |
| | | | 3 g KH₂PO₄ |
| | | | 0.5 g NaCl |
| | | | 1 g NH₄Cl |
| | Growth- | The strain grows well in | |
| | fermentation | fermenters | |
| | Manufacturing | The strain is being | No issues with scale up for |
| | scale | manufactured in large | manufacturing have been identified in |
| | | amounts for various studies | evaluation runs |
| | | including in vivo and animal | |
| | | studies | |
| | Naturally | Higher transformation and | Strain 105 is competent. |
| | competent | relative ease of genetic | Transformation using electroporation |
| | | manipulation to increase | has been confimed. |
| | | competency. | Strain 105 naturally produces ComK. |
| | | | Competency increased by genetic |
| | | | modification to overexpress ComK. |
| | | | Competency increased by |
| | | | overexpression of ComK under an |
| | | | inducible promoter. |
| | | | SEE EXAMPLE 7 |
| | Protease | Potentially produces | Strain 105 is genetically modified to |
| | production | proteases which can reduce | delete or inactivate genes encoding one |
| | | amount of one or more | or more proteases. |
| | | secreted proteins of interest. | SEE EXAMPLE 11 |
| | Plasmids | Strain 105 is free of any | The strain has been screened for |
| | | plasmids | potential mobile genetic elements |
| | | | (MGEs) and risk analysis of MGEs in |
| | | | the context of AMRs, toxins or |
| | | | virulence factors has been completed |
| | | | with no immediate risks identified. |
| | Prophages | No prophages were identified | |
| | | in the genome | |
| | Native | Strain 105 does not contain | |
| | CRISPR-Cas9 | any native Cas9 or CRISPR | |
| | | elements | |
| | Single | Similar to other bacterial | Kanamycin, chloramphenicol and |
| | crossovers, | species, B. subtilis undergoes | spectinomycin are commonly used |
| | double | single croosovers, which then | antibiotic markers for selection of |
| | crossovers, | resolve into double | initial site integration. Antibiotic |
| | markers for | crossovers | marker is used to select for single |
| | selection | | crossovers, then a non-antibiotic |
| | | | marker (such as manAP, upp, PheS etc) |
| | | | flanking the integration cassette is then |
| | | | used to select for double crossovers. |
| | Spores | Strain 105 is naturally spore | Spore forms can be used for |
| | | forming. | administration such as in a feed |
| | | | additive or other food type product, |
| | | | including for oral ingestion. |
| | | | Strain 105 can be genetically modified |
| | | | to delete or inactivate spore-related |
| | | | genes to generate a non-spore forming |
| | | | strain. Non-spore forming 105 mutant |
| | | | strain may increase production of one |
| | | | or more biomolecule or protein product |
| | | | of interest. |
| | | | SEE EXAMPLE 9 |
| | Genome | Predict metabolic pathways | Researchers have reduced the B. |
| | reduction & | based on the sequence data, | subtilis genome from 4 MB to 2.7 MB |
| | metabolic | metabolomics data and using | with enhanced productivity and with no |
| | pathway | B. subtilis #168 as a | issues (Reuß DR et al (2017) Genome |
| | prediction | reference strain. Identify | Res 27:289-299) |
| | | non-essential pathways/genes | ALSO SEE EXAMPLE 13 for lytic |
| | | and delete to reduce genome | enzyme and antibacterial peptide |
| | | size and improve genome | deletions |
| | | insertion and integration size | |
| | | capacity and | |
| | | production/expression | |
| | | efficiency. | |

### Example 7

### Modification of Strain 105 to Increase Competence

[0432] Competence is a physiological state that enables celis, including bacterial cells, to take up and internalize extracellular DNA. In practice, only a smali subpopulation of bacterial cells, such as B. subtilis celis, becomes competent when they enter stationary phase. Specifically, B. subtilis becomes competent when the competence transcription factor, ComK, reaches a certain threshold level (Maamar and Dubnau, 2005; Smits et al., 2005). ComK is the competence master regulator which activates about 100 genes for DNA-recombination, -repair, -binding, -uptake (Berka et al., 2002; Hamoen et al., 2002), celi division (Hamoen, 2011), as well as its own promoter in a positive feedback loop (van Sinderen and Venema, 1994). When B. subtilis cells enter stationary phase due to nutrient deprivation and high celi density, they start to differentiate into various subpopulations. Some of them become motile (Nishihara and Freese, 1975), while the others form biofilm (Vlamakis et al., 2008), secrete degradative enzymes and antibiotics (GonzAlez-Pastor et al., 2003), or finally sporulate (Rudner and Losick, 2001; Piggot and Hilbert, 2004). Another small subpopulation differentiates into competent cells able to take up extracellular DNA (Dubnau, 1991a; Dubnau and Provvedi, 2000).

[0433] It would be beneficial to have improved transformation efficiency of B. subtilis, including in rich media. Construction of a super-competent Bacillus strain has been reported using a genetically modified comKS encoding gene cassette, particularly under the control of a mannitol-inducible PmtlA promoter (Rahmer R et al (2015) Front Microbiol 6:1431; doi: 10.3389/fmicb.2015.01431). This cassette resulted in overexpression of both comK and comS and increased the transformation efficiency of B. subtilis with plasmid DNA by over 6-fold compared to wild type B. subtilis without the cassette.

[0434] B. subtilis strain 105 is genetically modified to increase competency by generating a modified 105 strain overexpressing comK and comS. In one approach, an expression cassette comprising the PxylA promoter from B. subtilis strain 105 linked to comK encoding sequence and followed by in frame comS encoding sequence. ComK and comS are produced under the control of the PxylA promoter. The PxlA promoter is a xylose inducible promoter.

[0435] The following provides an exemplary expression cassette including a promoter (PxlA promoter from B. subtilis strain 105, ComK encoding sequence, and ComS encoding sequence (SEQ ID NO: 37)

AGCGATATCCACTTCATCCACTCCATTTGTTTAATCTTTAAATTAAGTAT
AAACATAGTACATAGCGAATCTTCCCTTTATTATATCTAATGTGTTCATA
AAAAACTAAAAAAAATATTGAAAATACTGATGAGGTTATATAAGATGAAA
GTAAGTTAGTTTGTTTAAACAACAAACTAATAGGTAACTTACAATATGAA
ATAAAATGCATTTGTATTTGAATGATCAGGTTTTGAATTTATTTTTAAGG
GGGAAATCACATGAGTCAGAAAACAGACGCACCTTTAGAATCGTATGAAG
TGAACGGCGCAACAATTGCCGTGCTGCCAGAAGAAATAGACGGCAAAATC
TGTTCCAGAATTATTGAAAAAGATTGCGTGTTTTATGTAAACATGAAGCC
GCTGCAAATTGTCGACAGAAGCTGCCGATTTTTTGGATCAAGCTATGCGG
GAAGAAAAGCAGGAACTTATGAAGTGACAAAAATTTCACACAAGCCGCCG
ATCATGGTGGACCCTTCGAACCAAATCTTTTTATTCCCTACACTTTCTTC
GACAAGACCCCAATGCGGCTGGATTTCCCATGTGCATGTAAAAGAATTCA
AAGCGACTGAATTCGACGATACGGAAGTGACGTTTTCGAATGGGAAAACG
ATGGAGCTGCCGATCTCTTATAATTCGTTCGAGAACCAGGTATATCGAAC
AGCGTGGCTCAGAACCAAATTCCAAGACAGAATCGACCACCGCGTGCCGA
AAAGGCAGGAATTTATGCTGTACCCGAAGGAAGAGCGGACGAAGATGATT
TATGATTTTATTTTGCGTGAGCTCGGGGAACGGTATTAGAATTTATTTTT

[chemical structure]

[chemical structure]

[chemical structure]

[chemical structure]

BOLD: PxylA promoter from B. subtilis #105
DOUBLE UNDERLINED: ComK encoding sequence
BOLD UNDERLINED: ComS encoding sequence

[0436] ComK encoding sequence of strain 105 is provided below (SEQ ID NO: 38):

ATGAGTCAGAAAACAGACGCACCTTTAGAATCGTATGAAGTGAACGGCG
CAACAATTGCCGTGCTGCCAGAAGAAATAGACGGCAAAATCTGTTCCAG
AATTATTGAAAAAGATTGCGTGTTTTATGTAAACATGAAGCCGCTGCAA
ATTGTCGACAGAAGCTGCCGATTTTTTGGATCAAGCTATGCGGGAAGAA
AAGCAGGAACTTATGAAGTGACAAAAATTTCACACAAGCCGCCGATCAT
GGTGGACCCTTCGAACCAAATCTTTTTATTCCCTACACTTTCTTCGACA
AGACCCCAATGCGGCTGGATTTCCCATGTGCATGTAAAAGAATTCAAAG
CGACTGAATTCGACGATACGGAAGTGACGTTTTCGAATGGGAAAACGAT
GGAGCTGCCGATCTCTTATAATTCGTTCGAGAACCAGGTATATCGAACA
GCGTGGCTCAGAACCAAATTCCAAGACAGAATCGACCACCGCGTGCCGA
AAAGGCAGGAATTTATGCTGTACCCGAAGGAAGAGCGGACGAAGATGAT
TTATGATTTTATTTTGCGTGAGCTCGGGGAACGGTATTAG

[0437] ComS encoding sequence of strain 105 is provided below (SEQ ID NO: 39): PGP-45 DNA

TTGAACCGATCAGGCAAGCATCTTATCAGCAGCATTATCCTGTATCCCC
GGCCCAGCGGAGAATGTATATCCTCAATCAGCTTGGACAAGCAAACACA
AGCTACAACGTCCCCGCTGTACTTCTGCTGGAGGGAGAAGTAG

[0438] Sequence of PxylA_Bs105, a xylose inducible promoter from strain 105 is provided below (SEQ ID NO: 40):

AGCGATATCCACTTCATCCACTCCATTTGTTTAATCTTTAAATTAAGTA
TAAACATAGTACATAGCGAATCTTCCCTTTATTATATCTAATGTGTTCA
TAAAAAACTAAAAAAAATATTGAAAATACTGATGAGGTTATATAAGATG
AAAGTAAGTTAGTTTGTTTAAACAACAAACTAATAGGTAACTTACAATA
TGAAATAAAATGCATTTGTATTTGAATGATCAGGTTTTGAATTTATTTT
TAAGGGGGAAATCAC

[0439] In order to enhance the transformation efficiency of B. subtilis #105, the CDS of native ComK gene was deleted and replaced with ComKS under a xylose inducible promoter (xylA). A diagram of the intergration and replacement strategy is provided in FIG. 4. PCR and sequencing confirmed that the ComKS expression cassette was integrated correctly in the genome. Junction PCT first confirmed the correct integration of the ComKS expression cassette and then colony PCR showed the entire ComKS insert in the genome (data not shown).

[0440] Evaluation of the ComKS system demonstrated that it resulted in improvement in competency. Engineering of this inducible ComKS system improved the transformation efficiency by approximately 100-fold (from 2-3 colonies to 200-400 colonies/500 ng of DNA).

[0441] Other native or non-native promoters may be utilized in a comKcomS inducible expression cassette. In some embodiments the native or non-native promoter is inducible and permits controlled and timed competency, including under specific growth conditiond, with particular media additions, or under distinct or specified bacterial cell growth phases (such as growth phase vs stationary phase etc). Other exemplary indicible promoters include a strain 105 mannitol inducible promoter. The sequence of the mannose inducible promoter from B. subtilis strain 105 is as follows (SEQ ID NO: 41):

AAGCAGGGATTATTCCTTGCTTTTTTTTGTTATAGGGAAAAATGCCTTT
ATTACCGGAACCTATGGTAAAAAAAAGCGATTTTAATGAGCTGATTTCG
GTATACAGTTGAGACAAGATCTTATAATTCACACTTTAAAGGAGGGTTC
CT

### Example 8

### Signal Peptides for Secretory Production of Heterologous Proteins in Bacillus Subtilis

[0442] In instances where one or more relevant target biomolecule or protein is a secreted protein or must be secreted by the bacterial delivery cells to be either active or to reach the relevant location in the host system or organ(s) or tissues, a secretion signal or signal sequence can be incorporated to promote secretion of the molecule(s) or protein(s). In B. subtilis, the export of protein is generally accomplished by the Sec-type secretion pathway, which governs over 90 percent of the secretory proteins found in B. subtilis.

[0443] The N-terminal sequence of a secreted protein carries a specific secretion signal known as signal peptide. After the nascent peptide with the signal peptide is synthesized, it can be recognized and translocated by the components of the Sec-type secretory pathway through the membrane into the extracellular medium. The signal peptide can be a key factor determining the best pathway for the target protein and how it is secreted across the membrane.

[0444] Exemplary and suitable secretion signal peptides of strain 105 were identified through analysis of the global proteomics data. Several secretion signals are provided below. These can be fused to existing or encoding protein sequences, including in combination with a high expression or inducible promoter. These signal sequences can be utilized in expression cassettes and/or integrated with the encoding nucleic acid sequence to provide effective and efficient secretion of a biomolecule or heterologous protein. The signal sequence is fused in frame to coding sequence.

[0445] Bacillus subtilis strain 105 beta mannanase secretion signal is as follows (SEQ ID NO: 42):

TTGTTTAAGAAACATACGATCTCTTTGCTCATTATATTTTTACTTGCGT
CTGCTGTTTTAGCAAAACCAATTGAAGCGCATACTGTGTCGCCT

[0446] This sequence encodes a secretion signal peptide of amino acid sequence of:

(SEQ ID NO: 43)
LFKKHTISLLIIFLLASAVLAKPIEAHTVSP
(SEQ ID NO: 44)
LFKKHTISLLIIFLLASAVLAKPIEA

[0447] Bacillus subtilis strain 105 pel secretion signal is as follows (SEQ ID NO: 45):

ATGAAAAAAGTGATGTTAGCTACGGCTCTGTTTTTAGGATTGACTCCAG
CTGGCGCGAACGCAGCTGATTTAGGCCAC

[0448] This sequence encodes a secretion signal peptide of amino acid sequence of:

(SEQ ID NO: 46)
MKKVMLATALFLGLTPAGANAADLGH
(SEQ ID NO: 47)
MKKVMLATALFLGLTPAGANA

[0449] Bacillus subtilis strain 105 dacC secretion signal is as follows (SEQ ID NO: 48):

ATGAAAAAAAGCATAAAGCTTTATGTTGCTGTTTTACTGCTTTTCGTCG
TTGCTTCGGTGCCTTATATGCATCAGGCTGCGCTTGCC

[0450] This sequence encodes a secretion signal peptide of amino acid sequence of (SEQ ID NO: 49):

MKKSIKLYVAVLLLFVVASVPYMHQAALA

[0451] Alternative secretion signal sequences are known and available in the art. For example, Fu et al evaluated the extracellular production of alpha-amylase (AmyS) from GeoBacillus stearothermophilus by generating and screening a high-capacity signal peptide library in Bacillus subtilis (Fu, G et al (2018) J Agric Food Chem 66:13141-13151). A total of 173 Sec-type signal peptides from B. subtilis were fused to the target protein by a sequence-independent, PCR-based cloning method without using a restriction endonuclease or ligase (You, C.; Zhang, X. Z.; Zhang, Y. H. (2012) Appl Environ Microbiol 78 (5): 1593-5). The resulting multimeric plasmid library DNA harboring different signal peptides was transformed into B. subtilis and screened for constructs with high extracellular alpha-amylase activity utilizing a starch-iodine based high-throughput method. Signal peptides optimized for the secretory expression of AmyS were identified and validated by high-density fermentation. Numerous signal peptides were identified as candidates for improving the secretory expression of the alpha-amylase AmyS in B. subtilis. These signal peptides are listed below in TABLE 21 and may be utilized in strain 105. In fact, the above strain 105 pel secretion signal amino acid sequence corresponds in sequence to the pel signal sequence in the below table.

TABLE 21
Signal Peptides for Secretion of Protein as assessed based on AmyS Amylase Secretion

| name | length (aa) | signal peptide sequence |
|---|---|---|
| yvcE | 30 | MRKSLITLGLASVIGTSSFLIPFTSKTASA (SEQ ID NO: 50) |
| yoqM | 25 | MKLRKVLTGSVLSLGLLVSASPAFA (SEQ ID NO: 51) |
| yuaB | 30 | MKRKLLSSLAISALSLGLLVSAPTASFAAE (SEQ ID NO: 52) |
| pel | 21 | MKKVMLATALFLGLTPAGANA (SEQ ID NO: 53) |
| pelB | 24 | MKRLCLWFTVFSLFLVLLPGKALG (SEQ ID NO: 54) |
| yoaW | 24 | MKKMLMLAFTFLLALTIHVGEASA (SEQ ID NO: 55) |
| yqxI | 28 | MFKKLLLATSALTFSLSLVLPLDGHAKA (SEQ ID NO: 56) |
| lipA | 32 | MKFVKRRIIALVTILMLSVTSLFALQPSAKAA (SEQ ID NO: 57) |
| lipB | 28 | MKKVLMAFIICLSLILSVLAAPPSGAKA (SEQ ID NO: 58) |
| yoqH | 23 | MKRFILVLSFLSIIVAYPIQTNA (SEQ ID NO: 59) |
| ybfO 2 | 8 | MKRMIVRMTLPLLIVCLAFSSFSASARA (SEQ ID NO: 60) |
| sacB | 29 | MNIKKFAKQTVLTFTTALLAGGATQAFA (SEQ ID NO: 61) |
| bglS | 28 | MPYLKRVLLLLVTGLFMSLFAVTATASA (SEQ ID NO: 62) |
| yddT | 28 | MRKKRVITCVMAASLTLGSLLPAGYASA (SEQ ID NO: 63) |
| yobB | 25 | MKIRKILLSSALSFGMLISAVPALA (SEQ ID NO: 64) |

[0452] A person of skill in the art would recognize that, because of the redundancy of the genetic code, multiple nucleic acid sequences could encode the above peptides.

### Example 9

### Modification of Strain 105 to Generate Non-Spore Forming Strain

[0453] Bacillus subtilis is a gram-positive endospore-forming microorganism and holds a qualified presumption of safety (QPS) status from the European Food Safety Authority (Hohmann H P et al (2016) Industrial Biotechnology: Microorganisms pp 221-297) based on its non-pathogenicity and lack of exotoxins and endotoxins production. However, the B. subtilis strain frequently sporulates in response to physical and chemical stimuli, thus halting growth and causing nutrient wastage and reduced yield. Sporulation occurs naturally in B. subtilis culture and helps the bacterium to resist physical and chemical stimuli, supporting its terrestrial life. Spore is the dormant state, during which the synthesis and secretion of enzymes or chemical products cease. The spore is better equipped to resist extreme environments than a vegetative cell and can germinate, resuming vegetative growth in response to appropriate nutrients. Several reports have described varied approaches to prevent B. subtilis sporulation during fermentation for different target products. For example, deletion of the initial regulatory sporulation gene spoOA results in enhanced maintenance metabolism (Tannler S et al (2008) Microb Cell Factories 7:9-19), increased glucose consumption and acetate formation rates (Fischer and Sauer, 2005 Nat. Genet. 37, 636-640), and abolished polymyxin production in B. subtilis BSK4-OA (Park et al. (2012) Appl. Environ. Microbiol. 78, 4194-4199).

[0454] Wang et al engineered several non-sporulating B. subtilis strains by knocking out single sporulation-related genes involved in various stages of sporulation (spoOA, spoIIIE, and spoIVB) (Wang M et al (2020) Metabolic Engineering 62:235-248). The SpoOA-null non-spore forming mutant was especially efficient in producing secondary metabolites, such as surfactin.

[0455] Bacillus subtilis strain 105 (ELA191105) is modified and engineered to delete or otherwise inactivate SpoOA and/or SpoIVB encoding sequence. FIG. 1 depicts the SpoOA and SpoIVB locus wherein SpoIVb and SpoA are encoded by tandem located sequence. Both genes can be deleted by single deletion of the encoding region using overlapping sequences at the ends of or outside of the SpoIVb and SpoOA encoding sequence. The SpoOA and SpoIVB sequence for deletion to generate non-spore forming and modified B. subtilis strain 105 is as follows:

>Spo0A and SpoIVB sequence for deletion to generate non-spore forming B. subtilis
#105
(SEQ ID NO: 65)
TTAAGAAGCCTTATGTTCTAATCTCAGCTTATCCGCAACCATTGCAATGAATTCCGAATTTGTCGGTTTAGCTTTTGT
CATGCTGACAGTATAACCGAACAACGAGGAAATGGAATCAATGTTTCCTCTGCTCCATGCCACTTCAATTGCATGG
CGGATCGCTCTTTCTACACGGCTTGCGGTTGTGTTGAATTTTTTGGCGATGTCCGGATAGAGGACTTTTGTAATGCT
GCCGAGCAATTCGATGTCATTGTATACCATTGAGATTGCTTCGCGCAGATAGAGATAGCCTTTAATATGGGCTGGG
ACGCCGATTTCATGGATAATGCTTGTGATGCTCGCGTCGAGATTTTTCTTCTTTGGTTCAGGCTGGCTGCTGCGTAT
AATACTGCTTTGCGATGATGGCGCACGATGCGTCACACTGCTGGCATTTCCGCTGACCTGGCGGATATGGCCGACA
AGGTTTTCCATATCAAACGGTTTGAGAATAAAGTAGGACGCGCCTAAATCGACGGCCTTTTTCGTGACATCTTCCT
GTCCAAAGGCTGTCAGCATAATGACATTCGGCTGTTTTTTCAGATCTGATTCCCTCAGCCTCTCTAAAACCGCAAGT
CCGTCTAAATGCGGCATAATAATATCTAATACGAGCACATCGGGATCTTTTTCTTTAAACAGCGACAGGCATTCCTG
TCCGTTATAAGCAACGCCGATCACTTCCATGTCTTCCTGTCCTTCTATATATTCACTTAACAGGCTTACCAGCTCTCG
ATTATCATCAGCAACACAAACTTTAATTTTCTCCACGTTTCTTCCTCCCCAAATGTAGTTAACAGGATTCACCCTTGC
TACATGTTTACATTCGACAAAACCGCTATATACCCTCTAAAAAAATCATAATCACCAATATTAGTGGCATATCTTTGT
TATTCTATGTTTTTCTCTGTTTTTCGACTAAAAATGAAATTTGACAAACAAGGAAACGTGAATTTGTCGAAAAATCTT
CTTTTGTATATTTTACCGTATGTATTCTGAGAAGTGAAGAGGGATCAAAATAAAAAAACTGCCGGAAACTCCGGCA
GTCAGCTTGCTTTTTCTTTTCCATAAATATCGATTCCTGCTTCTGACAGCATCCATTCAATATGAACACCGTAGCCGC
TTGTCGGGTCATTTACAAATACATGGGTGACAGCACCGATCACTTTTCCATTTTGAATGATCGGGCTTCCGCTCATC
CCCTGTACGATGCCTCCTGTTTCTTTCAACAGTCTTGGATCGGTAATTTTCAACACCATTCCTTTTGTCGCAGGGAAT
TTTTGCGGCGTTGTGCTGACGATTTCAATATCGAATTTTTCTACTTTGTCATCATCAATAACGGTTAAAATTTCAGCC
GGCCCTTTTTTGACTTCGGTAGAAAACGCAACCGGCAATGCTTGATCTGATATGTTGTTTTGAATCGGCTGATGCA
GTGTGCCGAAAATCCCAAACGGGCTGTTTCTGTTAATATCCCCGATCGTTTTGCGTTCTGAGGAAAATCGCGCCAG
TTTTTCTCCCGGATTACCGCCTGTCCCTTTTTCAATTGATGTTACAGTGGATTTAACGATTTCTCCATTCTCCACTACA
ATTGGTTTCTTTGTGTCCATATCGGAAATCACGTGGCCAAGTGCTCCGTATTTTTTTGTTTTCGGTTCATAAAAGGTC
ATAGTGCCGATGCCGGCAGCAGAATCTCTGATATATAACCCGATTCTGTATTTGCCTTCTCCTTCATCCTTTTCTGGG
ATCAGCTTCGTTTTGATTTTCTGTTTATCACGTTTGATCAGTAAGTCTAAAGATTCACCAGTTTTCCCAGCCTTTTGA
ATAAATGGGGCTACATCATTCATTTTTTCAATTTTCTGTCCATTCATCTCAATAATGATGTCGCCCGCCTCAATTCCT
GCCGTTTCTCCCGGAGATTTTTTGCCTTCACTTGTATTGATTTGATGAAATCCGACGACAAGAACACCGACGGAATG
AAGTTTTACACCGATTGATTGTCCGCCAGGTATAACTTTTAAATCAGGAAGAACATGCACTTTTGTTTTTTTAATTG
GAAATCCGGCAAGATCATATACCAATTCTGACTCACCTGATTTTTTGCCCGTCACCTTGATTTCATGCGGATCTTTCT
TTACTGTAAACGCTTCTGAGGATTCTGATGTCTGAGCGTTTACCGATAAACTCGTTTCAATCGCTTGTGTTTGGGTT
TCAAATACTCTCATTTGCGTTGGAATCAGTAAATATTCTTTTAGCGGTTTGCATAAACCTACACTTAATAACGAAAC
AAGGAGAATTAAACCTACTGCTTTTCTGATGTTATCGGGCAT

[0456] Using the ComKS inducible strain described in Example 7 as a basis (this genetically modified strain having increased competence), a non-sporulating version of the B. subtilis #105 was generated.

[0457] A non-sporulating version of B. subtilis #105 was generated by deleting SpoOA and SpoIVB coding sequences and confirmed by PCR and sequencing. Junction PCR confirmed the correct deletion of sporulation genes in B. subtilis strain 105 (data not shown).

### Example 10

### Strain 105 Promoters for Expression of Heterologous Proteins or Sequences

[0458] Suitable B subtilis strain 105 promoters are identified through analysis of the genome and global proteomics data. The promoters are engineered upstream of nucleic acid encoding one or more biomolecules or heterologous proteins. The promoters are used in expression cassettes suitable to generate a genetically-modified bacterium which can produce biomolecules or heterologous proteins and/or express desired biomolecules or heterologous proteins to deliver them to host animals in need thereof. Expression cassettes would comprise a suitable promoter, a heterologous coding sequence encoding a desired biomolecule or heterologous protein, and a transcription terminator. The biomolecule or heterologous coding sequence may also comprise a signal sequence for secretion, a cell-wall anchor sequence, and/or a detectable peptide tag. Notably, multiple promoters in tandem are utilized and applicable in some constructs. Several copies of these promoters may be used in tandem to further increase expression. Selected and suitable promoter sequences from strain 105 include:

Bacillus subtilis #105 tuf promoter
(SEQ ID NO: 66)
AAGTGCCGAAGAGCGTCGCAGAAGAAATTATCAAAAAAAATAAAGGCGA
ATAATTGATTTTGCCGCTTAACTCAAGTATAACTACTATTGTAAGATGA
GGAAGTGAAAGCTTTCTTTCACTTCCTATCACTCTATACATTACTAATT
AAAAGCTCTTAAGGAGGATTTTAGA
Bacillus subtilis #105 SigX promoter
(SEQ ID NO: 67)
ATCGAGTCTGAATTTGCCGAAGAATCTTGTTCCATAAGAAACACCCGCT
GACTGAGCGGGTGTTTTTTTAATAGCCAACATTAATAAAATTTAAGGAT
ATGTTAATATAAATTCCCTTCCAAATTCCAGTTACTCGTAATATAGTTG
TAATGTAACTTTTCAAGCTATTCATACGACAAAAAAGTGAACGGAGGGG
TTTCAA
Bacillus subtilis #105 groS promoter
(SEQ ID NO: 68)
ATGGTATGTACTCCTTTGTTAAGTGGGTTTCGTTCATCTACAGCTATTG
TAACATAATCGGTACGGGGGTGAAAAAGCTAACGGAAAAGCGAGCGGAA
AAGAATGATGTAAGCGTGAAAAAATTTTTATCTTATCACTTGAAATTGG
AAGGGAGATTCTTTATTATAAGAATTGTGTTAGCACTCTTTAGTGCTGA
GTGCTAAAATTACATATTCATACTATTGAGGAGGTTATTACA
Bacillus subtilis #105 ftsH promoter
(SEQ ID NO: 69)
TCGGCAGCCTGCTTCCGAGATGGTTATTGTTTGTATTGGAATGATTTTC
TATGGTACTATTGAACATAGTTGTGCTTACTGTGGGAGGAGGTAAGGA

### Example 11

### Modification of Strain 105 to Inactivate or Delete Proteases

[0459] In instances where one or more relevant target biomolecule or protein must be secreted by bacterial host cells, inherent environmental proteases, including native bacterial proteases produced by the delivery bacteria, can reduce the amount and extent of active and full length biomolecule or protein available. The expression of recombinant secretory proteins in B. subtilis can be less efficient, of lower than desired yield, or even unsuccessful due to the degradation of secreted proteins by extracellular proteases (Westers L, Westers H, Quax W J. (2004) Biochim Biophys Acta 1694:299-310; https://doi.org/10 0.1016/j.bbamcr.2004.02.011). B. subtilis has eight native extracellular proteases, known as NprE, AprE, Epr, Bpr, Mpr, NprB, Vpr, and WprA (Jeong H et al (2018) Microbiol Resour Announc 7:e01380-18; doi.org/10.1128/MRA.01380-18). To increase the stability and/or systemic activity of secreted proteins, extracellular-protease-deficient mutants are constructed.

[0460] Although a factor limiting the application of Bacillus subtilis as an expression host has been its production of at least eight extracellular proteases, researchers have also reported that some proteases benefited the secretion of foreign proteins at times. Therefore, to maximize the yield of a foreign protein, the proteases can be selectively inactivated. Accordingly, the optimal protease-deficient host is constructed through inactivating the most unfavorable proteases.

[0461] Zhao and colleagues have conducted studies with various protease inactivations and combinations in B. subtilis and assessing the production of non-native proteins, particularly α-amylase (AmyM) (Corallociccus sp.), methyl parathion hydrolase (MPH) (Plesiomonas sp.) and chlorothalonil hydrolytic dehalogenase (Chd) (Pseudomonas sp.) by the protease mutants (Zhao L. et al (2019) Biotechnology and Engineering 116:2052-2060) This study showed that B. subtilis proteases AprE and NprE contribute the majority of extracellular protease activity. The remaining significant protease activity is fulfilled by Epr, NprB, Bpr, Vpr, WprA, and Mpr which is in agreement with previous reports (Ferrari, Jarnagin, & Schmidt (1993) in Bacillus subtilis and other Gram-positive bacteria 263:917-937)). For secreted AmyM and Chd protein production, mutant strains deficient in NprE, AprE and Epr proteases and mutant strains deficient in NprE, AprE, NprB, Vpr and WprA, respectively, were shown to provide optimal production. Overall, it is evident that the secretion level of a target protein can be improved through inactivation of extracellular proteases.

[0462] The sequences of the eight native extracellular proteases NprE, AprE, Epr (Epr1 and Epr2), Bpr, Mpr, NprB, Vpr, and WprA from B. subtilis strain 105 are provided below. These sequences are targeted by inactivation or deletion using recombinant techniques and genetic manipulation of the 105 genome. Deletion can be accomplished for example by targeting one or more gene in the genome using n-terminal region and C terminal region genomic sequence from that provided below and/or using flanking nucleic acid sequence to the N-terminus or C-terminus sequence linked to heterologous or selectable sequence for insertion to replace the selected and targeted protease sequence. Recombination and gene replacement can be selected and/or detected using skilled artisan known and recognized means and methods in the art.

Genes encoding proteases in Bacillus #105
>nprE
(SEQ ID NO: 70)
GTGGGTTTAGGTAAGAAATTGTCTGTTGCTGTCGCTGCTTCGTTTATGAGTTTATCAATCAGCCTGCCAGGTGTTCA
GGCTGCTGAAGGTCATCAGCTTAAAGAGAATCAAACAAATTTCCTCTCCAAAAATGCGATTGCGCAATCAGAACTC
TCTGCACCAAATGACAAGGCTGTCAAGCAGTTTTTGAAAAAGAACAGCAACATTTTTAAAGGTGATCCTTCCAAAA
GGCTGAAGCTTGTTGAAAGCACGACTGATGCCCTTGGATACAAGCACTTTCGATATGCGCCTGTCGTTAACGGAGT
GCCAATTAAAGATTCGCAAGTGATCGTTCACGTCGATAAATCCGATAATGTCTATGCGGTCAATGGTGAATTACAC
AATCAATCTGCTGCAAAAACAGATAACAGCCAAAAAGTCTCTTCTGAAAAAGCGCTGGCACTCGCTTTCAAAGCTA
TCGGCAAATCACCAGACGCTGTTTCTAACGGAGCGGCCAAAAACAGCAATAAAGCCGAATTGAAAGCCATAGAAA
CAAAAGACGGCAGCTATCGTCTTGCTTACGACGTGACGATTCGCTATGTCGAGCCTGAACCTGCAAACTGGGAAG
TCTTAGTTGACGCCGAAACAGGCAGCATTTTAAAACAGCAAAATAAAGTAGAACATGCCGCCGCCACTGGAAGCG
GAACAACTCTAAAGGGCGCAACTGTTCCTTTGAACATCTCTTATGAAGGCGGAAAATATGTTCTAAGAGATCTTTC
AAAACCAACAGGCACCCAAATCATCACATATGATTTGCAAAACAGACAAAGCCGCCTTCCGGGAACGCTTGTCTCA
AGCACAACGAAAACATTTACATCTTCATCACAGCGGGCAGCCGTTGACGCACACTATAACCTCGGTAAAGTGTACG
ATTATTTTTATTCAAACTTTAAACGAAACAGCTATGATAACAAAGGCAGTAAAATCGTTTCTTCCGTTCACTATGGC
ACTCAATACAATAACGCTGCATGGACAGGAGACCAGATGATTTACGGTGATGGCGACGGTTCATTCTTCTCTCCGC
TTTCCGGCTCATTAGATGTGACAGCGCATGAAATGACACATGGCGTCACCCAAGAAACAGCCAACTTGATTTATGA
AAATCAGCCAGGTGCATTAAACGAGTCTTTCTCTGACGTATTCGGGTATTTTAACGATACAGAAGACTGGGACATC
GGTGAAGACATTACGGTCAGCCAGCCTGCTCTTCGCAGCCTGTCCAACCCTACAAAATACAACCAGCCTGACAATT
ACGCCAATTACCGAAACCTTCCAAACACAGATGAAGGCGATTATGGCGGTGTACACACAAACAGCGGAATTCCAA
ACAAAGCCGCTTACAACACCATCACAAAACTTGGTGTATCTAAATCACAGCAAATCTATTACCGTGCGTTAACAAC
GTACCTCACGCCTTCTTCCACGTTCAAAGATGCCAAGGCAGCTCTCATTCAGTCTGCCCGTGACCTCTACGGCTCAA
CTGATGCCGCTAAAGTTGAAGCAGCCTGGAATGCTGTTGGATTGTAA
The encoded nprE protease is (SEQ ID NO: 71):
VGLGKKLSVAVAASFMSLSISLPGVQAAEGHQLKENQTNFLSKNAIAQSELSAPNDKAVKQFLKKNSNIF
KGDPSKRLKLVESTTDALGYKHFRYAPVVNGVPIKDSQVIVHVDKSDNVYAVNGELHNQSAAKTDNSQKV
SSEKALALAFKAIGKSPDAVSNGAAKNSNKAELKAIETKDGSYRLAYDVTIRYVEPEPANWEVLVDAETG
SILKQQNKVEHAAATGSGTTLKGATVPLNISYEGGKYVLRDLSKPTGTQIITYDLQNRQSRLPGTLVSST
TKTFTSSSQRAAVDAHYNLGKVYDYFYSNFKRNSYDNKGSKIVSSVHYGTQYNNAAWTGDQMIYGDGDGS
FFSPLSGSLDVTAHEMTHGVTQETANLIYENQPGALNESFSDVFGYENDTEDWDIGEDITVSQPALRSLS
NPTKYNQPDNYANYRNLPNTDEGDYGGVHTNSGIPNKAAYNTITKLGVSKSQQIYYRALTTYLTPSSTFK
DAKAALIQSARDLYGSTDAAKVEAAWNAVGL
>bpr
(SEQ ID NO: 72)
ATGAAGAAAAAAACGAAAAACAGACTCATCAGCTCTGTTTTAAGTACAGTTGTCATCAGTTCACTGCTGTTTCCGG
GAGCAGCCGGGGCAAGCAGTAAAGTCACCTCACCTTCTGTTAAAAAGGAGCTTCAATCTGCGGAATCCATTCAAA
ACAAGATTTCGAGTTCATTAAAGAAAAGCTTTAAAAAGAAAGAAAAAACGACTTTTCTGATTAAATTTAAAGATCA
GGCTAACACAGAAAAAGCGGCAAAAGCGGCTGTTAAAAAAGCGAAATCGAAGAAGCTGTCTGCCGCTAAGACGG
AATATCAAAAGCGTTCTGCTGTTGTGTCATCTTTAAAAGTCACAGCCGATGAATCCCAGCAAGATGTCCTAAAATAT
TTGAACGCCCAGAAAGATAAAGGAAATGCAGACCAAATTCATTCTTATTATGTGGTGAACGGGATTGCTGTTCATG
CCTCAAAAGAGGTTATGGAAAAAGTGGCGCAGTTTCCCGAAGTGGAAAAGGTGCTTCCTAATGAGAAACGGCAG
CTTTTTAAGTCATCCTCCCCATTTAATATGAAAAAAGCACAGAAAGCTATTAAAGCAACTGACGGTGTGGAATGGA
ATGTAGACCAAATCGATGCTCCAAAAGCTTGGGCACTTGGATATGATGGAACTGGCACGGTTGTTGCGTCCATTG
ATACCGGGGTGGAATGGAATCATCCGGCATTAAAAGAGAAATATCGCGGATATAATCCGGAAAATCCTAATGAGC
CTGAAAATGAAATGAACTGGTATGATGCCGTAGCAGGCGAGGCAAGCCCTTATGATGATTTGGCTCATGGAACCC
ATGTGACAGGCACGATGGTGGGCTCTGAACCTGATGGAACAAATCAAATCGGTGTAGCGCCTGGCGCAAAATGG
ATTGCTGTTAAAGCGTTCTCTGAAGATGGCGGCACTGATGCTGACATTTTGGAAGCTGGTGAATGGGTTTTAGCAC
CAAAGGACGCGGAAGGAAATCCCCACCCGGAAATGGCTCCTGATGTTGTCAATAACTCATGGGGAGGGGGCTCT
GGACTTGATGAATGGTACAGAGACATGGTCAACGCCTGGCGTGCGGCCGATATTTTCCCTGAGTTTTCAGCGGGG
AATACGGATCTCTTTATTCCCGGCGGGCCTGGTTCTATCGCAAATCCGGCAAACTATCCAGAATCGTTTGCAACTG
GAGCGACTGATATCAATAAAAAGCTCGCTGACTTTTCTCTTCAAGGGCCATCTCCATATGATGAGATAAAGCCGGA
AATATCTGCACCGGGCGTTAATATTCGTTCATCCGTTCCCGGTCAGACATATGAGGATGGTTGGGACGGCACATCA
ATGGCAGGGCCGCATGTATCCGCTGTTGCTGCACTGCTGAAACAGGCGAATGCCTCACTTTCTGTTGATGAGATGG
AGGATATATTAACCAGCACGGCTGAACCGCTCACGGATTCAACATTTCCTGATTCACCGAATAACGGATATGGCCA
TGGTCTGGTGAATGCTTTTGATGCTGTATCCGCTGTTACAGATGGTTTAGGGAAAGCGGAAGGACAAGTTTCTGTA
GAGGGGGATGACCAAGAGCCTCCTGTCTATCAGCATGAGAAAGTAACTGAAGCTTATGAAGGTGGTAGCCTGCC
ACTGACTTTGACAGCTGAAGACAATGTGAGTGTGACATCTGTAAAGCTGTCCTACAAGCTTGATCAAGGTGAATG
GACAGAAATAACGGCTAAACGAATCAGCGGTGATCATCTAAAAGGAACGTATCAGGCAGAGATCCCAGATATAA
AAGGAACTAAACTAAGCTATAAGTGGATGATTCACGATTTTGGCGGTCATGTCGTTTCGTCTGACGTATACGATGT
AACAGTGAAACCAAGCATCACGGCGGGATATAAGCAGGACTTTGAAACTGCACCCGGCGGCTGGGTTGCGAGCG
GAACAAATAATAACTGGGAATGGGGAGTTCCGTCAACTGGCCCAAATACAGCAGCATCCGGAGAAAAAGTATAT
GGAACGAATTTGACAGGAAATTATGCCAACTCAGCAAACATGAACCTTGTTATGCCTCCTATTAAAGCACCTGATT
CAGGAAGTCTGTTCCTTCAATTTAAAAGCTGGCACAATTTAGAGGATGATTTTGATTACGGCTACGTTTTTGTTCTT
CCGGAAGGTGAAAAGAATTGGGAGCAGGCTGGTGTCTATAACGGAAAGACATCAAGCTGGACGGACGAAGAAA
TTGATTTATCGGCTTATAAAGGCCAAAACATTCAAGTGATGTTTAACCTTCAATCTGATGAAAGCATTGCAAAAGA
GGGCTGGTATATTGATGATGTAGTGCTTTCTGACAAATCAGCCGGAAAAACAGTCAAAAAGAATAAGCTGGGCGT
CGAAAAGCCGTCTGGAAAGCAAAAGAAAAAGCCAGTAAATCCGAAAAAGGCTAAGCCATCTGCAAACACAGCGG
TAAAACATCAGAACAAGGCTATACAGCCTCAAGTTTTGCCGCTCAGGGCACAAGTCAGTGTAGTGGAAACAGGAA
AATCAACATATTCAGATCAATCCACAGGGCAGTACACGCTGAAGCACAAAGCGGGAGACTATACGCTTATGGCAG
AAGCATATGGTTATCAGTCGAAAACACAAAAAGTATCTTTAAAGACGGATCAGACGACACAAGCTAATTTTACGTT
AGAAGAGATGAAGAAGGGCACATTAAAAGGCATGGTCATCAATAAAACGACAGGAGAGCCGGTAACAGGCGCTT
CCGTTTATGTTGTAGAGGATGCTGCTGTGGAACCGGCTATGACAAACGACAAAGGTGAATATACGCTGGAGGCCT
ATGAAGGCGCTTATACGATTAAAGTCGCTGCACCGGGTTATTACAGTGATGAATTTTCCGTTGAGTTAAAAGGTGA
TGTTACAAAAGAAACTGCATTGAAGCCTTTCGTCGGTTATCCGGGTGAAATTGCATATGATGACGGAACAGCGGA
GAATGCCAATTCCTATTTTGCTGCCGGTAACGGATGGGCGGTAAAAATGACGCTCGCTGACGGCAAGGACAAAGG
CATGCTTACAGGAGGGCTGTTCAGATTCTGGGATACAGAGTTCCCAGATCCGGGCGGCACAGAGTTTAAGGTTGA
GGTATACGATGCCACAGGAAAAGACGGAGCACCGGGCAAGAAAATTGCAGGGCCATTTAACGCTGAAGCTCTTC
GCAATGGCGAGTGGACTAAGGTAGATCTCAGTTCAAAAGGGATTATGGTCGATAGAGACTTTTATCTCGTATATAT
CCAGTCAAAACCTGACCCGTATTCACCTGGACTGGCAATGGATGAAACCGGCAAGAATTCCGGCCGCAACTGGCA
GTATATAGGTGGACAATGGGAGCCGGGTGACGAAGCAGACGGCAACTATATGATTCGCGCATTAGTTAATTATGA
AGCTGCTGTACCTGAGATTACTTCACCGACAGACAAATCATACACAAATAAGGATAGCGTCACTGTAAAAGGAAA
CGCTTCTCCTGGCACAACGGTACACATTTATAATGGAGAGAAAGAAGCAGGAGAAACGAAAGCTGCTGCGGATG
GCACGTTCCATGCAGGCATCATACTCAACAAGGGTGAAAATGAGCTGACGGCAACTGCATCAACTGACAACGGAA
CAACAGATGCCTCCAGCCCAATCACGGTCACGCTTGATCAAGAAAAGCCTGAATTAACACTGGACAATCCAAAGG
ATGGCGGGAAAACAAATAAAGAAACGCTGACTGTCAAAGGGGCTGTATCCGATGACAATCTGAAAGACGTCAAG
GTGAATGGCAAAAAAGCAACAGTAGCTGATGGTTCATACTCAGCCCGTATTCTTTTGGAAAATGGAAGAAATGAA
ATCAAGGTAATTGCTACAGACTTGGCAGGCAACAAAACGACGAAAAAGACAGTCATTGATGTGAACTTTGACAAG
CCTGTCATTTCCGGCTTAATTCCGGGAGAGGATAAAAACTTAAAAGCCGGTGAATCTGTGAAAATCGCTTTCTCAA
GCGCTGAGGATTTAGATGCAACGTTTACCATTCGTATGCCGCTGACGAATGCAAGAGCGAGTGTGCAAAATGCCA
CCGAACTCCCGTTAAGAGAAATCTCTCCGGGGAGATATGAAGGCTATTGGACTGCCACTTCTTCTATTAAAGCAAA
AGGAGCAAAAGTAGAAGTGATCGTCCGAGATGATTATGGAAATGAAACAAGAAAAACTGCGAATGGAAAACTTA
ATATCAACACAGAAAATTAA
>vpr
(SEQ ID NO: 73)
TTGAAAAAGGGGATCATTCGCTTTCTGCTTGTAAGTTTCGTCTTATTTTTTGCGTTATCCACAGGTATTACGGGCGT
CCAGGCAGCTCCGGCTTCTTCAAAAACGTCGGCTGATCTGGAAAAAGCCGAGGTATTCGGTGATATCGACATGAC
GACAAGCAAAAAAACAACCGTTATAGTGGAATTAAAAGAAAAATCCTTGGCAGAAGCGAAGGAAGCGGGAGAAA
GCCAATCGAAAAGCAAGCTGAAAACCGCTCGCACCAAAGCAAAAAATAAAGCAATCAAAGCGGTGAAAAACGGA
AAAGTAAACCGGGAATATGAGCAGGTATTCTCAGGCTTCTCTATGAAGCTTCCAGCTAATGAGATTCCAAAACTTC
TCGCGGTAAAAGACGTTAAGGCGGTGTACCCGAACGTCACATATAAAACAGACAATATGAAGGATAAAGACGTCA
CAATCTCCGAAGACGCCGTATCTCCGCAAATGGATGACAGTGCGCCTTATATCGGAGCAAACGATGCATGGGATT
TAGGCTACACAGGAAAAGGCATTAAGGTGGCGATTATTGACACTGGGGTTGAATACAATCACCCAGATCTGAAGA
AAAACTTTGGACAATATAAAGGATACGATTTTGTGGACAATGATTACGATCCAAAAGAAACACCAACCGGCGATC
CGAGGGGCGAGGCAACTGACCATGGCACACACGTAGCCGGAACTGTGGCTGCAAACGGAACAATTAAAGGCGTA
GCGCCTGATGCCACACTTCTTGCTTATCGTGTGTTAGGGCCTGGCGGAAGCGGCACAACGGAAAACGTCATCGCG
GGCGTGGAACGTGCAGTGCAGGACGGGGCAGATGTGATGAACCTGTCTCTCGGAAACTCTTTAAACAACCCGGA
CTGGGCGACAAGCACAGCGCTTGACTGGGCCATGTCAGAAGGCGTTGTCGCTGTTACCTCAAACGGCAACAGCGG
ACCGAACGGCTGGACAGTCGGATCGCCGGGCACATCAAGAGAAGCGATTTCTGTCGGTGCGACTCAGCTGCCGCT
CAATGAATACGCCGTCACTTTCGGCTCCTATTCTTCAGCAAAAGTGATGGGCTATAACAAAGAGGACGACGTCAAA
GCGCTCAATAACAAAGAAGTTGAGCTTGTCGAAGCGGGAATCGGCGAAGAAAAGGATTTTCAAGGGAAAGACCT
GACAGGCAAAGTCGCCGTTGTCAAACGAGGTAGCATTGCATTTGTGGATAAAGCGGATAACGCTAAAAAAGCCG
GTGCAATCGGCATGGTTGTGTATAACAACCTCTCTGGAGAAATTGAAGCCAATGTGCCAGGCATGTCTGTCCCAAC
GATTAAGCTTTCATTAGAAGACGGCGAAAAACTCGTCAGCGCCCTGAAAGCTGGTGAGACAAAAACAACATTCAA
GTTGACGGTCTCAAAAGCGCTCGGTGAACAAGTGGCTGATTTCTCATCACGCGGCCCTGTTATGGATACGTGGAT
GATTAAGCCTGATATTTCCGCGCCAGGGGTCAATATCGTGAGCACGATCCCAACACACGATCCTGACCATCCATAC
GGCTACGGATCAAAACAAGGAACAAGCATGGCATCGCCTCATATTGCCGGAGCGGTTGCCGTTATTAAACAAGCC
AAGCCAAAGTGGAGCGTTGAACAGATTAAAACCGCCATCATGAATACCGCTGTCACTTTAAAGGATAGCGATGGG
GAAGTATATCCGCATAACGCTCAAGGCGCAGGCAGCGCAAGAATCATGAACGCAATCAAAGCAGATTCGCTCGTC
TCACCTGGAAGCTATTCATACGGCACGTTCTTGAAGGAAAACGGAAACGAAACGAAAAAAGAAACGTTTACGATT
GAAAATCAATCTTCCATTAGAAAATCATACACACTGGAATACTCATTTAATGGCAGCGGCATCTCCACATCCGGCAC
AAGCCGTGTTGTGATTCCGGCACATCAAACCGGGAAAGCCACTGCAAAAGTAAAGGTCAATACGAAGAAAACAA
AAGCTGGCACCTATGAAGGAACGGTTATCGTCAGAGAAGGCGGAAAAACGGTCGCTAAGGTACCTACATTGCTG
ATTGTGAAAGAGCCCGATTATCCGAGAGTCACATCTGTCTCTGTCAGCGAAGGGTCTGTACAAGGTACCTATCAAA
TTGAAACCTACCTTCCTGCGGGAGCGGAAGAGCTAGCGTTCCTCGTCTATGACAGCAACCTTGATTTCGCAGGCCA
AGCCGGCATTTATAAAAACCAAGATAAAGGTTACCAGTACTTTGACTGGGACGGCACGATTAATGGCGGAACCAA
ACTTCCGGCCGGAGAGTATTACTTGCTCGCATATGCCGGAAACAAAGGCAAGTCAAGCCAGGTTTTGACCGAAGA
ACCTTTCACTGTTGAATAA
The encoded vpr protease is:
(SEQ ID NO: 74)
LKKGIIRFLLVSFVLFFALSTGITGVQAAPASSKTSADLEKAEVFGDIDMTTSKKTTVIVELKEKSLAEA
KEAGESQSKSKLKTARTKAKNKAIKAVKNGKVNREYEQVFSGFSMKLPANEIPKLLAVKDVKAVYPNVTY
KTDNMKDKDVTISEDAVSPQMDDSAPYIGANDAWDLGYTGKGIKVAIIDTGVEYNHPDLKKNFGQYKGYD
FVDNDYDPKETPTGDPRGEATDHGTHVAGTVAANGTIKGVAPDATLLAYRVLGPGGSGTTENVIAGVERA
VQDGADVMNLSLGNSLNNPDWATSTALDWAMSEGVVAVTSNGNSGPNGWTVGSPGTSREAISVGATQLPL
NEYAVTFGSYSSAKVMGYNKEDDVKALNNKEVELVEAGIGEEKDFQGKDLTGKVAVVKRGSIAFVDKADN
AKKAGAIGMVVYNNLSGEIEANVPGMSVPTIKLSLEDGEKLVSALKAGETKTTFKLTVSKALGEQVADFS
SRGPVMDTWMIKPDISAPGVNIVSTIPTHDPDHPYGYGSKQGTSMASPHIAGAVAVIKQAKPKWSVEQIK
TAIMNTAVTLKDSDGEVYPHNAQGAGSARIMNAIKADSLVSPGSYSYGTFLKENGNETKKETFTIENQSS
IRKSYTLEYSFNGSGISTSGTSRVVIPAHQTGKATAKVKVNTKKTKAGTYEGTVIVREGGKTVAKVPTLL
IVKEPDYPRVTSVSVSEGSVQGTYQIETYLPAGAEELAFLVYDSNLDFAGQAGIYKNQDKGYQYFDWDGT
INGGTKLPAGEYYLLAYAGNKGKSSQVLTEEPFTVE
>epr1
(SEQ ID NO: 75)
ATGAAAAACATGTCTTGCAAACTTGTTGTATCAGTCACTCTGTTTTTCAGTTTTCTCGCCATAGGCCCTCTCGCTCAT
GCGCAAAACAGCAGCGAGAAAGAGGTTATTGTGGTTTATAAAAACAAGGCCGGAAAGGAAACCATCCTGGATAG
TGATGCTGATGTTGAACAGCAGTATAAGCATCTTCCCGCGGTAGCGGTCACAGCAGACCAGGAGACAGTAAAAGA
ATTAAAGCAGGATCCTGATATTTTGTATGTAGAAAACAACGTATCATTTACCGCAGCAGACAGCACGGATTTCAAA
GTGCTGTCAGACGGCACTGACACCTCTGACAACTTTGAGCAATGGAACCTTGAGCCCATTCAGGTGAAACAGGCTT
GGAAGGCAGGACTGACAGGAAAAAATATCAAAATTGCCGTCATTGACAGCGGGATCTCCCCCCACGATGACCTGT
CGATTGCCGGCGGGTATTCAGCTGTCAGTTATACCTCTTCTTACAAAGATGATAACGGCCACGGAACACATGTCGC
AGGGATTATCGGAGCCAAGCATAACGGCTACGGAATTGACGGCATCGCACCGGAAGCACAAATATACGCGGTTA
AAGCGCTTGATCAGAACGGCTCGGGGATCTTCAAAGTCTTCTCCAAGGAATTGACTGGTCGATCGCAAACGGGAT
GGACATCGTCAATATGA
>epr2
(SEQ ID NO: 76)
ATGAGCCTTGGCACGACGTCAGACAGCAAAATCCTTCATGAGGCCGTGAACAAAGCATATGAACAAGGTGTTCTG
CTTGTTGCCGCAAGCGGTAACGACGGAAACGGCAAGCCAGTGAATTATCCGGCGGCATACAGCAGTGTCGTTGCT
GTTTCAGCAACAAACGAAAAGAATCAGCTTGCCTCCTTCTCAACAACTGGAGATGAAGTTGAATTTTCAGCGCCGG
GGACAAACATCACAAGCACTTACTTAAACCAGTATTATGCAACAGGAAGCGGAACATCCCAAGCGACACCGCACG
CCGCTGCCATGTTTGCTTTGTTAAAACAGCGTGATCCTGCCGAGACAAACGTCCAGCTTCGCGAGGAAATGCGGA
GAAATATCGTTGATCTTGGTACCGCAGGCCGCGATCAGCAATTTGGCTACGGCTTAATCCAATATAAAGCACAGGT
AACAGATTCAGCGTACGCGGCAGCAGAGCAAGCGGTGAAAAAAGCGGAACAAACAAAAGCACAAACCGAAATCA
ACAAAGCGCGAGAACTCATCAGCCAGCTGCCGGGCTCCGACGCCAAAACTGCCCTGCAAAAAAGACTGGATAAA
GTACAGTCATACAGAAATGTAAAAGATGCGAAAGACAAAGTCGCAAAGGCAGAAAAATATAAAACACAGCAAAC
CGTTGATACAGCACAAACTGCCATCAACAAGCTGCCAAACGGAACAGACAAAAAGAACCTTCAAAAACGCTTAGA
CCAAGTAAAACGCTACATCGCGTCAAAGCAAGCGAAAGACAAAGTTGCGAAAGCGGAAAAAAGCAAAAAGAAAA
CAGATGTGGACAGCGCACAATCAGCAATTGGCAAGCTGCCTGCAAGTTCAGAAAAAACGTCCCTGCAAAAACGCC
TTAACAAAGTGAAGAGCACCAATTTGAAGACGGCACAGCAATCCGTATCTGCGGCTGAAAAGAAATCAACTGATG
CAAATGCGGCAAAAGCACAATCAGCCGTCAATCAGCTTCAAGCAGGCAAGGACAAAACGGCATTGCAAAAACGA
TTAGACAAGGTGAAGAAAAAGGTGGCGGCGGCTGAAGCAAAAAAAGTCGAAACTGCCAAGGCAAAAGTGAAGA
AAGCGGAAAAAGACAAAACAAAGAAATCAAAGACATCCGCTCAGTCTGCAGTGAATCAATTAAAAGCATCCCATG
AAAAAACAAAGCTGCAAAAACGGCTGAACGCCGTCAAACCGAAAAAGTAA
>wprA
(SEQ ID NO: 77)
ATGAAACGCAGAAAATTCAGCTCGGTTGTGGCGGCAGTGCTTATTTTTGCACTGATTTTCAGCCTTTTTTCTCCGGG
AACCAAAGCTGCAGCGGCCGGCGCGATCGATCAGGCGGCTGCTCTGGAAAACGGCAAAGAGCAGACAGGCGCC
ATGAAGGAGCCGGAACAGGTGAAATGGTACAAAGTGACCCCGGGAGCAACGGATATTCAGAAAAACTCACATAT
GGCACTGACCGTAAAGAGTGATTCAGTACTGAATGTATCTGTATATCCAAGTAAGGAAAAAGCGCTTAAAGATGA
GACGTTTGAGATGTACCGTTCTTTCACAGCGGAGGATGGAAAAAGCGAAGTCATTTTTCCATACGCGTGGAGCGG
CCCTTACTATGTAAAAGTTGAATACCTCGGAGAAGAAGAGCCAGAGGACGGCGGAACGGCAGAAGCAGCTGCAG
AAGCCAAGTATACGATTGGGTATAAAGGCACCAAAAAACAGCCGTCAGATTTAGAAGAGGAAGAAGCTTGTCCG
GTTGAAATGAGTGTCGATCAGAAGAAATCAGGAAAAGGCATCCTGGATAAGCTGAGAGCGATTCGTGATGAGCA
GCTGAGCCAAACAGCAGAAGGCAAAGAACTGACAAGCCTTTATTACAAAGCAGCACCGTTTATCGTTGCAAAGCT
CGCACTCAATAAAACAGCAAGAAATGAAATCTATCAGGATCTTGTGACATTAAAGCCGTTATTTGACGATGTGTCA
GAAAACGGAGCATCATCTTCGCATAAGGTCACTGAAAAGGATCAAAAAGCAATCAACCGGCTATATGATAAAGCT
TTACAATCAGTCCCGTCATTCCTTAAAGAGGAGATAAAGAAACAAGCGGACCGACTAAATATGAAGCAGCTGCAA
GGCAAAACAGCCGGAGCCATTTTAACAGAAAACCATATTGCAGCAAAAAGTGAAGTTCAGACAACAAAGGTTATT
TTCAAGGTGAAGGACAATAAAAGCCTCTCATCCGTACATAATGAAATGAAGGGCTTTTCTGCAAGCGCGCAATCG
AAAAAAGACATATCCAATGTGAAAAAGGCAAAGAAACTGTTTGACAATCTGTATTCATTTGAACTTCCGAAAGATG
AGAAACAGAACGGCGCATATACGGCAAGCGCCAAAAGGGTCAAAAGCGCTGCTGCGACACTATCCAAGATGTCC
AATGTAGAGTTTGCGGAACCCGTGCAGGAATACAAAAGCCTGGCAAACGACATTCAGTACCCTTATCAATGGCCG
CTTAAAAACAACGGTGAAAACGGGGGTGTCAAAAATGCGGATGTGAAATATGAGCCTGCCAACACATTGCTGTCC
AAACGCAAGCTTAACGATACACTCATTGCAGTAGTAGACACAGGCGTAGACAGCACGCTTGCTGATTTAAAAGGA
AAAGTAAGAACAGATCTCGGACACAATTTTGTCGGACGGAATAACAATGCAATGGATGATCAGGGGCATGGGAC
GCATGTCGCAGGCATTATTGCGGCCCAAAGCGATAACGGCTATTCAATGACTGGATTGAATGCCAAAGCAAAAAT
CATCCCGGTAAAAGTGCTTGATTCCGCAGGTTCCGGAGATACTGAACAAATTGCTCTCGGCATCAAATATGCTGCT
GACAAAGGAGCAAAGGTGATTAATTTAAGTTTAGGCGGAGGCTACAGCCGCGTGCTTGAATTTGCTTTGAAGTAC
GCAGCTGACAAAAATGTCTTGATTGCCGCAGCCAGCGGGAATGATGGAGAAAATGCCTTATCTTATCCAGCATCTT
CTAAATATGTGATGTCAGTCGGCGCAACGAACCGCATGGATATGACCGCTGATTTCTCTAACTATGGAAAAGGTCT
GGACATCTCTGCTCCAGGGTCTGATATCCCGAGCTTAGTACCGAACGGAAATGTCACGTACATGAGCGGAACGTC
TATGGCGACGCCGTATGCTGCCGCTGCTGCAGGATTGCTGTTTGCTCAAAATCCTAAGCTGAAAAGAACAGAAGTT
GAGGATATGTTGAAAAAGACGGCAGATGACATTTCCTTTGAAAGTGTCGATGGCGGAGAAGAAGAGTTGTATGA
CGATTATGGCGATCCGATTGAAATTCCGAAGACACCTGGTGTAGACTGGCATTCAGGCTACGGGCGGCTGAATGT
CATGAAGGCTGTCAGCGCAGCTGATTTACAGCTTAAGGTCAACAAGCTGGAAAGCACTCAAACAGCTGTCAGAGG
AAACGCGAAGGAAGGCACACTTATCGAGGTGATGAACGGCAAAAAGAAACTCGGCAGCGCCAAAGCCGGAAAA
GACAATGCGTTCAAGGTCAATATCGCGACTCAAAAACAGGATCAAGTACTGTATGTGAAAGCAACAAAAGGCGAT
GCGAAAACATCGTATAAAGTTGTCGTCGTCAAAGGAAAACCTTCCGGCACACCGAAAGTAAACGCGGTGAAAACG
AAGGATACGGCAGTAAAAGGGAAGGCAAACAGCAAAGCGATGATCAGAGTGAAAAACAAATCAAAGAAAGTCA
TTGCTTCTGCCAAAGCTGACGCAAAAGGAACGTTTTCGGTGAAAATCAAAAAACAAAAAGCCGGAACGGTGCTGT
ACGTCACGGCTGCGGATACAGATAAAAAAGAAAGCAAGGAAGCAAAAGTGGTTGTTGAAAAGTAA
>nprB
(SEQ ID NO: 78)
TTGCGCAACCTGACCAAGACATCTCTATTACTGGCCGGCTTATGCACGGCGGCCCAAATGGTTTTTGTAACACATG
CCTCAGCTGATCAAAGCATCAAATACGACCATACGTATCAAACCCCTTCATACATCATCGAAAAGTCACCGCAGAA
GCCGGTACAAAACACAACCCAGAAAGAATCGCTATTTTCCTATCTTGACAAGCATCAAACGCAGTTTAAGCTCAAA
GGGAATGCGAACAGCCATTTTCGTGTTTCGAAAACCATAAAGGATCCAAAGACAAAACAAACGTTTTTTAAATTAA
CGGAGGTTTACAAAGGAATTCCGATTTACGGCTTTGAACAAGCGGTCGCGATGAAGGAAAACAAACAAGTGAAA
AGTTTCTTTGGAAAGGTGCATCCGCAAATCAAGGACGTCTCCATCACACCGTCTATTTCTGAGAAAAAAGCAATAC
ATGCAGCAAGGCGTGAGCTCGAGGCTTCCATTGGAAAAATCGAATATCTTGATGGGGAACCAAAAGGCGAATTAT
ATATCTATCCACACGACGGTGAATATGATCTCGCCTACCTTGTGAGACTCTCGACATCTGAACCTGAGCCTGGCTAT
TGGCATTATTTCATCGATGCCAAAAACGGAAAGGTCATTGAGTCCTTTAATGCCATTCATGAAACGGCAGGTACAG
GAATCGGCGTATCAGGTGATGAAAAAAGCTTTGACGTCAGAGAACAAAATGGGCGCTTTTATTTGGCTGACGAAA
CAAGGGGAAAAGGGATCAATACATTTGACGCGAAGAACCTGAACGAAACCTTGTTTACGCTTTTGTCTCAACTGAT
CGGGTATACGGGCAAAGAAATAGTCAGCAGCACGTCCGTATTTAATGAACCTGCGGCTGTAGACGCACACGCAAA
TGCGCAAGCCGTTTACGATTATTACAGCAAGACATTTGGCCGTGATTCTTTTGATCAAAACGGAGCAAGGATTACG
TCTACCGTGCATGTCGGCAAACAATGGAACAATGCTGCGTGGAACGGTGTCCAGATGGTATACGGGGATGGAGA
CGGTTCGAAATTTAAGCCGCTGTCTGGATCGCTCGACATTGTCGCGCATGAAATCACACACGCAGTCACACAGTAT
TCCGCCGGTCTTTTATATCAAGGAGAACCCGGTGCATTAAATGAGTCCATTTCTGACATTATGGGCGCGATGGCTG
ACCGTGATGATTGGGAGATCGGCGAAGATGTCTATACTCCTGGTATTGCAGGAGATTCATTGCGGTCATTGGAGG
ACCCATCTAAGCAGGGAAATCCAGATCATTACTCGAACCGCTACACAGGAACAGAGGATTATGGCGGAGTCCATA
TCAATTCGTCCATTCACAATAAAGCAGCTTATCTTCTTGCAGAAGGAGGCGTGCACCACGGTGTACAGGTTGAAGG
GATTGGGCGTGAAGCAAGTGAACAAATTTACTATCGGGCTTTAACATATTATGTAACGGCATCTACAGATTTCAGC
ATGATGAAGCAAGCGGCGATTGAAGCTGCCAATGATTTATACGGTGAAGGCTCGAAGCAATCAGCTTCAGTCGAA
AAGGCGTATGAGGCTGTCGGCATTCTATGA
The encoded nprB protease is (SEQ ID NO: 79):
LRNLTKTSLLLAGLCTAAQMVFVTHASADQSIKYDHTYQTPSYIIEKSPQKPVQNTTQKESLFSYLDKHQ
TQFKLKGNANSHFRVSKTIKDPKTKQTFFKLTEVYKGIPIYGFEQAVAMKENKQVKSFFGKVHPQIKDVS
ITPSISEKKAIHAARRELEASIGKIEYLDGEPKGELYIYPHDGEYDLAYLVRLSTSEPEPGYWHYFIDAK
NGKVIESFNAIHETAGTGIGVSGDEKSFDVREQNGRFYLADETRGKGINTFDAKNLNETLFTLLSQLIGY
TGKEIVSSTSVFNEPAAVDAHANAQAVYDYYSKTFGRDSFDQNGARITSTVHVGKQWNNAAWNGVQMVYG
DGDGSKFKPLSGSLDIVAHEITHAVTQYSAGLLYQGEPGALNESISDIMGAMADRDDWEIGEDVYTPGIA
GDSLRSLEDPSKQGNPDHYSNRYTGTEDYGGVHINSSIHNKAAYLLAEGGVHHGVQVEGIGREASEQIYY
RALTYYVTASTDFSMMKQAAIEAANDLYGEGSKQSASVEKAYEAVGIL
>aprE
(SEQ ID NO: 80)
GTGAGAAGCAAAAAATTGTGGATCAGCTTGTTGTTTGCGTTAACGTTAATCTTTACGATGGCGTTCAGCAACATGT
CTGCGCAGGCTGCCGGAAAAAGCAGTACAGAAAAGAAATACATTGTCGGATTTAAACAGACAATGAGTGCCATG
AGTTCCGCCAAGAAAAAGGATGTTATTTCTGAAAAAGGCGGAAAGGTTCAAAAGCAATTTAAGTATGTTAACGCG
GCCGCAGCAACATTGGATGAAAAAGCTGTAAAAGAATTGAAAAAAGATCCGAGCGTTGCATATGTGGAAGAAGA
TCATATTGCACATGAATATGCGCAATCTGTTCCTTATGGCATTTCTCAAATTAAAGCGCCGGCTCTTCACTCTCAAG
GCTACACAGGCTCTAACGTAAAAGTAGCTGTTATCGACAGCGGAATTGACTCTTCTCATCCTGACTTAAACGTCAG
AGGCGGAGCAAGCTTCGTACCTTCTGAAACAAACCCATACCAGGACGGCAGTTCTCACGGTACGCATGTAGCCGG
TACGATTGCCGCTCTTAATAACTCAATCGGTGTTCTGGGCGTAGCGCCAAGCGCATCATTATATGCAGTAAAAGTG
CTTGATTCAACAGGAAGCGGCCAATATAGCTGGATTATTAACGGCATTGAATGGGCCATTTCCAACAATATGGATG
TTATTAACATGAGCCTTGGCGGACCTTCTGGTTCTACAGCGCTGAAAACAGTCGTTGATAAAGCCGTTTCCAGCGG
TATCGTCGTTGCTGCCGCTGCCGGAAACGAAGGTTCGTCCGGAAGCTCAAGCACAGTCGGCTACCCTGCAAAATA
TCCTTCTACTATTGCGGTAGGTGCGGTAAACAGCAGCAACCAAAGAGCTTCATTCTCAAGCGCAGGTTCTGAGCTT
GATGTGATGGCTCCTGGCGTATCCATCCAAAGCACACTTCCTGGAGGCACTTACGGTGCTTACAACGGCACGTCCA
TGGCGACTCCTCACGTTGCCGGAGCAGCAGCGCTAATTCTTTCTAAGCACCCGACTTGGACAAACGCGCAAGTCCG
TGATCGTTTAGAAAGCACTGCAACATATCTTGGAAACTCTTTCTACTATGGAAAAGGGTTAATCAACGTACAAGCA
GCTGCACAATAA
The encoded aprE protease is:
(SEQ ID NO: 81)
VRSKKIWISLLFALTLIFTMAFSNMSAQAAGKSSTEKKYIVGFKQTMSAMSSAKKKDVISEKGGKVQKQF
KYVNAAAATLDEKAVKELKKDPSVAYVEEDHIAHEYAQSVPYGISQIKAPALHSQGYTGSNVKVAVIDSG
IDSSHPDLNVRGGASFVPSETNPYQDGSSHGTHVAGTIAALNNSIGVLGVAPSASLYAVKVLDSTGSGQY
SWIINGIEWAISNNMDVINMSLGGPSGSTALKTVVDKAVSSGIVVAAAAGNEGSSGSSSTVGYPAKYPST
IAVGAVNSSNQRASFSSAGSELDVMAPGVSIQSTLPGGTYGAYNGTSMATPHVAGAAALILSKHPTWTNA
QVRDRLESTATYLGNSFYYGKGLINVQAAAQ
>mpr
(SEQ ID NO: 82)
ATGAAATTAGTTCCAAGATTCAGAAAACAATGGTTCGCTTACTTAACGGTTTTGTGTTTGGCTTTGGCAGCAGCGG
TATCTTTTGGCGTACCGGCAAAAGCGGCAGAGAACCCGCAAACTTCTGTATCGAATACCGGTAAAGAAGCTGATG
CTACGAAAAACCAAACGTCAAAAGCAGATCAGGTTTCCGCCCCTTATGAGGGAACCGGAAAAACAAGTAAATCGT
TATACGGCGGCCAAACGGAACTGGAAAAAAACATTCAAACCTTACAGCCTTCGAGCATTATCGGAACTGATGAAC
GCACCAGAATCTCCAGCACGACATCTTTTCCATATAGAGCAACCGTTCAACTGTCAATCAAGTATCCCAACACTTCA
AGCACTTATGGATGTACCGGATTTTTAGTCAATCCAAATACAGTCGTCACGGCTGGACATTGTGTGTACAGCCAGG
ATCATGGATGGGCTTCGACGATAACCGCCGCGCCGGGCCGCAATGGTTCGTCATATCCGTACGGTACTTATTCAGG
CACGATGTTTTACTCCGTCAAAGGATGGACGGAAAGCAAAGACACCAACTATGATTACGGAGCTATTAAATTAAAC
GGTTCTCCTGGAAACACGGTTGGCTGGTACGGCTACCGGACTACAAACAGCAGCAGTCCCGTGGGCCTTTCCTCGT
CAGTGACAGGATTCCCGTGTGACAAAACCTTTGGCACGATGTGGTCTGATACAAAGCCGATTCGCTCCGCTGAAAC
GTATAAGCTGACCTATACAACCGATACGTACGGCTGCCAAAGCGGCTCGCCTGTTTATCGAAACTACAGTGATACA
GGGCAGACAGCTATTGCCATTCACACGAACGGAGGATCGTCATATAACTTGGGAACAAGGGTGACGAACGATGT
ATTCAACAATATTCAATATTGGGCAAATCAATAA

[0463] Using the ComKS inducible strain described in Example 7 as a basis (this genetically modified strain having increased competence), protease encoding genes such as nprE and vpr were deleted from B. subtilis #105. Deletion of wprA, nprB and aprE genes from B. subtilis #105 was also undertaken.

[0464] Protease encoding genes nprE and vpr were deleted from B. subtilis #105 and confirmed by PCR and sequencing (data not shown).

### EXAMPLE 12

### Integration of Nucleic Acids or Expression Casettes Encoding Biomolecules or Heterologous Proteins in the B. Subtilis Strain 105 Genome

[0465] A sequence or coding region encoding a desired biomolecule or heterologous protein can be integrated into the chromosome of the genetically-modified microorganism of B. subtilis strain 105. This is an alternative to expression of one or more biomolecule or heterologous protein on a plasmid, which can lead to stability issues and copy number issues that could limit applicability for delivery of the biomolecule or heterologous protein.

[0466] One of the strategies to introduce new genes into bacterial host is based on the homologous recombination between identical sequences of double stranded DNA. The frequency of recombination can depend on the length of homology and on host factors. Antibiotic resistance genes are utilized in the construction of integration vectors and in the integration steps to promote and select for recombination events and integration. If plasmid (integration vector) containing two DNA fragments (fragment A and fragment B) which are homologous to some parts of the chromosome (A and B sequences on the chromosome) and a gene of interest (X gene) is placed between these two fragments, a double crossover event will result in the integration of the gene X into the chromosome between fragments A and B. The original DNA sequence of the chromosome between A and B will be substituted for by the X gene. The integration site is determined by the sequences of A and B. The precision of recombination is achieved by pairing complementary strands of DNA from the plasmid and chromosome.

[0467] In the case of a single crossover event, the whole plasmid will integrate into either A or B. Then, in the case of the second crossover the plasmid sequences will be eliminated from the chromosome and the X gene will integrate between sequences A and B. Homologous recombination is utilized in step (1) integration of the whole plasmid (integration vector) into the chromosome (single crossover), and then in step (2) a further recombination event removes all foreign DNA including the plasmid replication origins and antibiotic resistance genes from the chromosome (double crossover). The initial integration step (1) can be monitored by gain of antibiotic resistance and the second step removal of plasmid/vector sequences can be monitores by loss of antibiotic resistance. PCR of the target integration site region of the strain chromosome and sequencing across the region is utilized to confirm full and proper integration.

[0468] Chromosomal integration can be accomplished with a suicide vector. A suicide vector comprises an origin of replication for replication in E. coli, a drug resistance marker for selection, and an expression cassette flanked by nucleic acids homologous to a specific region of the chromosome.

[0469] For chromosomal integration one or more B. subtilis gene may be interrupted by the insertion of the expression cassette (notably this can also be used to inactivate the B. subtilis gene and simultaneously replace it with a gene or nucleic acid encoding a biomolecule or heterologous protein of interest). Heterologous sequences can be integrated in the strain 105 genome. For example, nonessential gene locations can be selected or chosen for integration. Integration can be achieved by replacing the nonessential gene with another sequence of interest, such as a sequence encoding a biothereapeutic molecule, polypeptide, antigen, thereapeutic molecule, immunomodulatory molecule, antibody or fragment thereof including a VHH antibody or nanoboy etc.

[0470] Genes suitable as appropriate and applicable integration sites include alpha amylase (amyE), nprE, apr and wprA. The nprE, apr and wprA genes encode proteases and integration at these gene sites to replace the respective genes serves to integrate the heterologous sequence of interest while also inactivating the protease. The gene maps for each of amyE, nprE, apr and wprA on the B. subtilis strain 105 genome are shown in FIG. 2. Native strain 105 sequences for each of nprE, apr and wprA on the B. subtilis strain 105 genome are provided above in Example 11.

[0471] Alpha amylase is an enzyme that hydrolyses a bonds of large, α-linked polysaccharides. Deletion or inactivation of the amyE gene encoding alpha amylase in Bacillus subtilis is well tolerated and not detrimental to the growth of the bacteria. Gene integration at the amyE site is utilized and further described and provided herein in the examples. The amyE gene sequence from B sub strain 105 is provided below:

>ELA191105_amyE
(SEQ ID NO: 111)
ATGTTTGCAAAACGATTCAAAACCTCTTTACTGCCGTTATTCGCTGGATTTTTATTGCTGTTTCATTTGGTTCTGGCA
GGACCGGCGGCTGCGAGTGCAGAAACGGCGAACAAATCGAATGAGCTAACAGCACCGTCGATCAAAAGCGGAAC
CATTCTTCATGCATGGAATTGGTCGTTCAATACGTTAAAACATAATATGAAGGATATTCATGATGCAGGATATACA
GCCATTCAGACATCTCCGATTAACCAAGTAAAGGAAGGGAACCAAGGAAATAAAAGCATGTCGAACTGGTACTGG
CTCTATCAGCCGACATCGTACCAAATTGGCAACCGTTACTTAGGAACTGAACAAGAATTTAAAGAAATGTGTGCAG
CCGCTGAAGAATATGGCATAAAGGTCATTGTTGACGCGGTCATCAATCATACCACCAGTGATTATGCCGCGATTTC
CAATGAGGTTAAGAGTATTCCAAACTGGACACATGGAAACACACAAATTAAAAACTGGTCTGATCGATGGGATGT
CACGCAGAATTCATTGCTCGGGCTGTATGACTGGAATACACAAAATACACAAGTACAGTCCTATCTGAAACGGTTC
TTAGAAAGGGCTTTGAATGACGGGGCAGACGGTTTTCGATTTGATGCCGCCAAACATATAGAGCTTCCGGATGAT
GGGAGTTACGGCAGTCAATTTTGGCCGAATATCACAAATACATCTGCAGAGTTCCAATACGGAGAAATCCTGCAG
GATAGTGCCTCCAGAGATGCTGCATATGCGAATTATATGGATGTGACAGCGTCTAACTATGGGCATTCCATAAGGT
CCGCTTTAAAGAATCGCAATCTGGGCGTGTCGAATATCTCCCACTATGCATCTGATGTGTCTGCGGACAAGCTAGT
GACATGGGTAGAGTCGCATGATACGTATGCCAATGATGATGAAGAGTCGACATGGATGAGCGATGATGATATCC
GTTTAGGCTGGGCGGTGATAGCTTCTCGTTCAGGCAGTACGCCTCTTTTCTTTTCCAGACCTGAGGGAGGCGGAAA
TGGTGTGAGATTCCCGGGGAAAAGCCAAATAGGTGATCGCGGGAGTGCTTTATTTGAAGATCAGGCTATCACAGC
GGTCAATAGATTTCACAATGTGATGGCTGGACAGCCTGAGGAGCTCTCGAATCCAAATGGAAACAACCAGATATT
TATGAATCAGCGCGGCTCACATGGCGTTGTGCTGGCAAATGCAGGTTCATCCTCTGTTTCTATCAATACGCCAACA
AAATTGCCTGATGGCAGATATGACAATAAAGCTGGGGCAGGTTCATTTCAAGTGAATGATGGTAAACTGACAGGC
ACGATCAATGCCAGGTCTGTGGCTGTGCTTTATCCTGATGATATTGCAAAAGCGCCTCATGTTTTCCTTGAGAATTA
CAAAACAGGTGTAACACATTCTTTCAATGATCAACTGACGATTACCTTGCGTGCAGATGCGAATACAACAAAAGCC
GTTTATCAAATCAATAATGGACCAGAGACAGCGTTTAAGGATGGAGATCAATTCACAATCGGAAAAGGAGATCCA
TTTGGCAAAACATACACCATCATGTTAAAAGGAACGAACAGTGATGGTGTAACGAGGACCGAGGAATACAGCTTT
GTTAAAAGAGATCCAGCTTCGGCCAAAACCATCGGCTATCAAAATCCGAATCATTGGAGCCAGGTAAATGCTTATA
TCTATAAACATGATGGGGGCGGGGCAATTGAATTGACCGGATCTTGGCCTGGAAAACCAATGACTAAAAATGCAG
ACGGAATTTACACGCTGACGCTACCTGCGGATACGGATACAACCAACGCCAAAGTGATTTTTAATAATGGCAGCGC
CCAAGTGCCTGGCCAGAATCAGCCTGGCTTTGATTACGTGCAAAATGGTTTATATAATGACGCGGGCTTAAGCGGT
TCTCTTCCTCATTGA

[0472] One or more biomolecule or heterologous protein may be integrated in the B subtilis 105 strain genome for production or delivery via a modified B subtilis 105 strain. Integration may be at one site or at more than one site in the B subtilis 105 strain genome. For example, a first construct providing one or more first set of one or more biomolecule or heterologous protein may be integrated at a site selected from amyE, nprE, apr and wprA and a second construct providing one or more second set of one or more biomolecule or heterologous protein may be integrated at a site selected from amyE, nprE, apr and wprA. A first construct providing one or more first set of one or more biomolecule or heterologous protein may be integrated at the amyE site and a second construct providing one or more second set of one or more biomolecule or heterologous protein may be integrated at a site selected from nprE, apr and wprA. Other suitable genes and sites for integration are also contemplated and may be selected from one or more native lytic enzymes and/or antibacterial peptides, for example as provided in Example 15.

### Example 13

### Deletion of Native Lytic Enzymes and/or Antibacterial Peptides

[0473] B. sutilis strain 105 is modified to delete one or more native lytic enzymes and/or antibacterial peptides. These one or more deletions serve to reduce the genome size of the B. subtilis strain. It also serves to remove potential antibacterial activity of the strains, to the extent that this might be detrimental to their growth or colonization. The reduced genome serves to enable insertion of larger encoding cassettes or heterologous sequence for encoding or producing biomolecules or homologous or heterologous sequences. Also, the reduced genome size can facilitate improved and/or faster or more efficient growth of the bacteria. This further serves to improve expression and production of the biomolecule or heterologous protein of interest by the modified bacteria.

[0474] For example, native B. subtilis strain 105 lytic enzymes for deletion include one or more of the following:

>xpf
(SEQ ID NO: 83)
ATGCAAGACTTACTATTTGAATATAAACGAACGCTCAAACAAACAAGAAACCAATATAAACCGCTCGCTG
AGGCAGATGAATCCGTGCTCTCAGCTGAAGAGCTGAAGGATAAAAAAATCATCAGAAATATGATTACTGA
TCTTGAATATGTAACAGAATGGCTTGAAAAAGGAAGGCAGCCCGGCATCAGACGGGCGATTGACCGGCGT
GATGCTTACCAGCGGCTGATGATCAAGGACCCGAGAATCATCGAATCATTTTCCAGCGCTATGATGTTTG
AGCCGGACGGACAGGTATCAGAAGAAGACAGAGATAGAATTCGAGAAGCATTAGCCCTGTTAACGGACAG
AGAAAAGGAAATGTTTTTGCTGCATAAGGTAGAATGTTTTTCTTATGAACGGATCGCCGATCTTCTCGGC
GTAAAAAAATCGACAGTGCAAACGACGATTAAACGGGCGAGTTTAAAGATGCAAAGACAGCAGGAAGACA
TGAATCGATCACTTGCCTGA
>lytC1
(SEQ ID NO: 84)
ATGTTATGGAGGAGCTTGGCGCTGTGCGGATTGGCTTTGACGCTCGCGCCTTGTGCACAGGCAGCAGAGC
CGATAGAAGGGAAAACAGTGTATATTGATGCCGGACACGGCGGTGAAGATAGTGGAGCGGTCGGAAACGG
GCTCTTTGAAAAGGATATTAATTTGGCTGTCTCAGAGCATGTGACAGACAAACTAAAAGAGGAGGTAGCC
AATCCTGTTGCATCCCGGTCTGACGATCATTTTCTGACCTTGGAGGAAAGAGTGGCTAAGGCAAGTGCCA
ATCAGGCTGACCTTTTTGTCAGCATTCATGTGAATTCAGGGGTTGCTTCAGCTTCAGGAACAGAAACGTA
TTTTCAATCTGATTATGAAGGGGAGAACAGCCGGCGTCTCGCATCCGATATTCAGTCAGAGCTCGTTTCT
TCCTTACAAACGAGAGACAGGGGCGTGAAAGAATCAGACTTTTACGTCATTACATATTCACAAATGCCAA
GTGTGTTGGCGGAGCTTGGGTTTATCACGAACAGCTCTGACGCGGACAAGCTGGGAAGTGAAGAATACCA
GCAAAAGGCCGCAGATGCGATTGTCAACGGCATTGATTCTTATTATGATCAGTAG
>lytC2
(SEQ ID NO: 85)
TTGCGTTCTTATATAAAAGTCCTAACAATGTGTTTTCTGGGGCTCATACTTTTTGTGCCAACAGCTTTGG
CCGATAATTCAGTGAAAAGAGTCGGGGGAAGCAATAGATACGGCACTGCTGTACAAATATCAAAGCAAAT
GTATTCAACAGCAAGTACAGCTGTAATTGTTGGTGGGAGTTCCTATGCAGATGCTATTTCAGCAGCACCC
CTTGCTTACCAGAAGAATGCGCCATTGCTTTACACTAATTCTGATAAGCTTTCATATGAAACGAAAACAA
GATTGAAAGAGATGCAGACTAAAAATGTAATTATTGTAGGCGGAACACCTGCTGTTTCATCTAACACTGC
TAACCAGATTAAAAGTTTGGGGATAAGTATTAAACGAATTGCAGGAAGCAACCGTTATGATACGGCTGCA
CGGGTGGCAAAAGCGATGGGTGCGACTTCAAAAGCTGTTATTTTGAATGGCTTCTTATATGCAGACGCTC
CGGCCGTCATTCCTTATGCAGCGAAAAACGGGTATCCAATTCTTTTTACAAATAAAACATCTATAAATAG
TGCGACAACGTCTGTGATAAAAGATAAGGGAATTTCGAGTACCGTTGTTGTAGGAGGCACTGGAAGTATC
AGCAATACGGTATACAACAAGTTACCTTCTCCTACAAGAATTAGTGGTTCAAACAGATATGAGCTTGCTG
CAAATATCGTACAAAAACTTAATTTATCAACAAGCATCGTATATGTAAGCAATGGATTCAGCTACCCTGA
CTCTATTGCAGGAGCTACACTGGCAGCTAAGAAGAAGCAATCTCTTATCCTTACAAATGGTGAAAATTTA
TCTACAGGAGCCCGTAAAATTATTGGAAGTAAAAACATGTCAAACTTTACGATTATCGGAAACACTCCTG
CCGTAAGCACCAAGGTTGCTAATCAGCTAAAGAATCCAGTTGTAGGTGAAACAATCTTTATTGATCCGGG
TCACGGTGATCAAGATTCAGGAGCAATCGGCAATGGACTCCTTGAGAAAGAAGTCAACCTTGATATAGCG
AAAAGAGTCAATACAAAGCTAAATACTTCAGGTGCTCTTCCAGTACTGTCAAGATCTAATGATACTTTTT
ATTCTTTACAGGAGAGAGTAAATAAAGCAGCTTCTGCACAAGCAGATTTATTTATCAGTATACATGCAAA
TGCTAATGATAGCTCATCACCAAATGGAAGTGAGACGTACTACGATACAACATATCAAGCTGCAAATAGC
AAGAGACTGGCTGAACAAATTCAACCAAAGTTAGCGGCTAATCTTGGAACGAGAGACCGGGGAGTAAAAA
CAGCCGCTTTCTATGTTATTAAATATTCTAAAATGCCGAGTGTTTTAGTTGAAACTGCCTTTATCACTAA
TGCATCAGATGCAAGTAAATTGAAGCAAGCGGTTTATAAAGATAAAGCTGCACAAGCTATTCATGACGGC
ACAGTATCTTATTACAGATAA
>sdpC
(SEQ ID NO: 86)
TTGAAGAAGGCGTTTCTAGTATTTTTGTCGGTTGTATTGGTGACGACTGTGTTTTTGGTGAAGCAGCAAG
AAAGTGTGGCACAGGCAAAGCAGCTTGAGTATTCAGGTGAGGAAATTTTTAAAGGCTTTGTGTTTGCCCA
AGGGGAAGTTGGCAAACAGCTTCCAGAGGTCTTTAATAAAGCGATGACAGACAAACTCAACACAAAACAG
GCAAAGGCTTTTGCCAATCAGGTTGTCGCTGATATTAAAAAAGAGGATGCTGACTTTTTTGATAACCTGA
AGAAAGCTGTTTACAGCAAAGATGCATTGAAAGTGGATGAACTGCTGAAAAAAGCAGGTCAAATCGTTGA
AGAAAAAGTAGAAGCTGCAAAGGAAATCGCCGCTTCTAAGGATGATACATCCAGAGTTCAGGCCGAGCTT
GTCAACACTGTTGATACCGCTAACTATTTCTATTATGTTTCTTATGTTGCTGCAGCAGGTGCCCTGATTC
TGATCATTCTCGCCATTGATATTACGCCGATTGCGATTTCAGACAATGTGGATCGCGAAATGGCAATCAG
AACGCTGGTTGATGAATTAAACTAG

### EXAMPLE 14

### Production of Gamma Polyglutamic Acid

[0475] Gamma polyglutamic acid (poly-γ-glutamic acid; (γ-PGA) is a naturally occurring biopolymer made from repeating units of L-glutamic acid, D-glutamic acid, or both. Since some bacteria are capable of vigorous γ-PGA biosynthesis from renewable biomass, γ-PGA is considered a promising bio-based chemical and is already widely used in the food, medical, and wastewater industries due to its biodegradable, non-toxic, and non-immunogenic properties. As a biodegradable, water-soluble, edible, and non-toxic biopolymer, γ-PGA and its derivatives can be used safely in a wide range of applications including as thickeners, humectants, bitterness-relieving agents, cryoprotectants, sustained release materials, drug carriers, heavy metal absorbers, and animal feed additives. Peptidoglycan bound γ-PGA may protect bacterial cells against phage infections and prevent antibodies from gaining access to the bacterium. Also, γ-PGA can be utilized as an oral therapeutic for diabetes in dogs and cats. Dietary γ-PGA has been shown to have plasma glucose-lowering effects.

[0476] FIG. 3A depicts the pathway for poly-γ-glutamate biosynthesis. The B. subtilis strain 105 native locus for producing PGA is shown in FIG. 3B. The native B. subtilis locus comprises capC, capB and capA encoded from a single promoter. The CapABC locus sequence is as follows:

CapABC locus sequence
(SEQ ID NO: 87)
GCTGGGCAAATAAAAAGAGAGTGTCTCCTCAGACACTCTCTTTTTTGAATTATTTATTGGCGTTTACCGG
TTCTTCCTGCTGCTGGATTTTATTCATTTCCATATCAATCTTCTGTTTTTCCTGATCTGTCAGCTGATCA
TTGAATTTAAAAGCTGACATAAACATGAACACGATGGCTACGGCAACAAACGGCCAGATGGCTTTGACAA
ATTTCATCTTTATCACTCCGTTTATTTAGATTTTAGTTTGTCACTATGATCAATATCAAACGTCAGTTTT
CCGTCTTCTACTTTCCAAGCGAAATTAGAGTCTTTCGTCAGTTCGCGAATAATGGTTTTCTGTTTAAGGC
TGTCTTTTTTCACAGGTGCAGGTGTCGCTTCATGGATATCGATCGGTGTCACTTCAAAGCGGCCTGTTCC
ATTTTTCTTCAGGTGATACTGAACCAGTGCACTGTCTCTTGTTCTCGTCCAGCCTTGGTCAAAGACAAAG
TTGCCGAGGCTGTAGAAAATGACGGTTCCGTTATATACTTCAATCGGTTCTAAGACGTGCGGATGATGGC
CGACGATGATGTCAGCTCCCGCATCAGACATGGCTCTTGCAAGCTGGCGCTGGCGGTCGTTTGGATCATT
GTCATACTCTTGGCCCCAGTGTGACTGCACAACAACGATGTCCGCATGTTTTTTCGCTTCTGAAATCATA
GGGATGAAGATTTCAGGATCTGCGGGCAGCACGCCCGGCGTATTCTTTTTAGCCGCGAAACCTTTCCCGG
ACACATCGGTAAAGCCAAGCGTTGCAATTGTTACCCCGTTGACTTTCTGGTACGAAATTTTCTTTTTCGC
ATCACTTAAGCTGTATCCCGCTCCAACGATATCAAGGTTTTGCTTCGCAAATTCTCCAAGCGTATCTTTC
ATGCCCTGAACGCCGTAATCCATTGCGTGGTTGTTTGCGCTGTTGAGAACTGTGAAATTCATGTCCTTCA
AGACTTTCACTGATTCCTTATTCGTCTGCAGATGAATCTCTTTATCTGCTTGTTTATAATTCTTTTGATA
GGTTACCGGGTTTTCAAAGTTTCCTGCTACATAATCCGAAGCTCTAAAGATCGGTTCAACATATTGAAAA
ATACTGTCTGCCCCTTTTTGCTCCGTTACTTTTTCAACATAGCGTCCCATCATAATATCGCCTACAAATG
AGGCTGAAAGTACGTCGTCAGAATACGTTTTGACCTTCGGCGTTTCCGCTTTTCCCGCCCACATGAAAGC
GAACATAAGGACAAAAACGATCGGAATGGCAATAAATACGTGCTTATTGGTTTTCTTTTTTTGCTGTTTT
GTCAGCTTTAGCAGCTTTTCATGAAAGCTCAGTTCTTTTTTCATCGTTTGACACACCTTACATTAAATTA
AGTAGTAAACAAACATGATAGCAAAGGTCGCTCCGCTCAATAGCAGCGTGCTTCCGAACGTAATGGTTAA
ACCTTGTTTCTGAATGGTATTGGCAATTAAACCTGGCACGATGATGCCGATTCCTCGAAATTCTGCGATT
TCAAATGGTACAATCGGGTATAGAAAATCAAACGCGATTTTTAGGACGATCCCTGTTATCAGCATGGCAG
CGAATTTTCTGCGTCCGTACAAAATCATAAATTTGGATAAACCGTATTTCACGATAACATAAGTGAGCAA
GCTCACTAGCAAAACAAGTAAAATAAAGACCGGCTGATTAAACACAAGTCCTAAATATCCCGGTACAACA
AGTCCTGCCGGCACGATCCCTGTTTTTTCCGCAAAAATTAAACTGAGTAGTACACCTAAAATTAGTGCGA
TGTATAAATCTGATCCGAACATGTTTGCATTTCCCCCTAGCTTACGAGCTGCTTAACCTTGTATTCGTGG
ATTTTTTCAATTAAAGGCTCTGCGGCACCATGAATATTGCCGACGCCATATATGACACGGTTGTGCATTC
TTTTCTTTAACAATTCCATAATTTCATCTGTTGACTTATACTCTAGATCATGCAGTTTGTCTGCAGGAAT
TTTGCCTTCTTCGTAGGCTTTTACGACCGGTTCTGTTGTTTCACCGATTAAGATCAGTTCACTTGCTTCA
ATATAAGGCAATACGTCATTTGCGAATTGCTGTGTCCGATCGACACGGTCTGCGCGGCAGTTCATGATGA
TGATCGGATCATCGGTCGGGTAACCGATTTCTTTTACACGTTTCCATATATTCAAAGTAGAAGAAGCGTC
GTTTGCGGCAAACCCATTAACAAAGTGCCCAGGCTCGCTCGGACTGATCAGCGGAAGAATTCTCATTGCT
CCCGGATCTGGCGGCGCATTCAGCATTCCCTTAAATGCTGTTTCTTCGTCAATGCCGAGTGCTTGAGCCA
CACCCAGCGCCAGAGAAGCGTTATCAGGGAATACCATGTATTCAAATTTACGTAAATACTCATCTGTAAT
TTTTGAGTTATCAGCAATGATGACTTTTGTGTTTCGTTCTTTTGCTTTTTGTTTAAAGAACTCGGTATAT
TCACTATCTGTAATGACAAGATGGCCATTATAAGGAATTGTAGCAGTAAACGCTTCTGCAATTTCATCAA
GCGTCGGCCCCATGACATCCATATGGTCTTCCAAAACATTCACAATGACGCCGATATTGGCCTGCAGAAG
TTCTTCCTGAAAGATGATTTGATAATCTGGGTTAACAGCCATGCATTCACTGACAATCGCGTTAGCCCCT
CTTTCTACTGTTTCTCTCATGACTTCTTTTTGCTCTCCGATATTCGGCCCCTGAGGTTTCCGTTTAATCG
GCTTTTCCTCCGGTGTGTCCCAGTAAATCATTCTTGCATCTGTTCCTGTTGTTTTTCCAACAGTCTTGTA
ACCGGCTTCTATTAATATTCCGGTTGTCAGCCTTGTCACAGTCGATTTTCCGCGGATGCCGTTAATATTC
ACCCGAACAGGGAGGGCATCAATGTTTTTCTGATGTCGTCGTTTTTCTAATATTCCGATGACCAGTATGA
CAGCACAGGCTATAATGAGTAACCACATTGCTTTTCGACATCTCCTTCTATATTGTTGTAAATTCATTCA
TCAGTATATAGAATCACTATGAATTCTCAATCGGCATTATGTAACATAATCTTCCCTAATCGACTAAGCC
AAACTTCTCTTTTGAAAGAGATTTTATACCTACAAACTGTTTTCTATTTTTGGAAAACAGCAGGACTTAT
ACCTTATCACTTTTTTAAAAAATTGAAGAGAATGCGCTTTCATTTTTCTCCTGATATCCTTCTGGACGTA
TAGTCACACCCTGCTGTTTGTATTTAATATGCATTTCAAATCAATCTTTTTTTCAGCCTGTGTTATCAAG
CATTTCCTGCTATCATGCGTGTTTCCGGTTCTTATGAACACAAAATAATTTTATCCTGTTTCTTAAGGAC
AAGGTCATAATGTCATCCTTTCTGCATGGAATAAGCAATATGAGGCCCATTCCAAAATGACTAAGGAGGT
TCGAGATGAAAACGCTAAACATACGAGTCCGAATTCTCTAACATAATTAAACATTTTCTGGGATGATAGT
CTTTTCTGTTTCTCACCATTTACAGGTCTAAACGCATGA

[0477] B. subtilis strain 105 is modified to produce increased amounts of poly-γ-glutamate. B. subtilis strain 105 is modified to produce inducible poly-γ-glutamate. Strain 105 capABC locus is modified to add an inducible promoter in place of the native promoter. The strain 105 capABC locus is modified to replace the native promoter with one or more promoter, including tandem promoters. Exemplary promoters are provided in Example 10. In an alternative approach, an additional capABC locus, including with an alternative, inducible or tandem promoters to provide enhanced or increased or inducible production of the capABC locus encoded proteins is integrated in strain 105 genome sequence.

[0478] Genes suitable as appropriate and applicable integration sites include amyE, nprE, apr and wprA. The nprE, apr and wprA genes encode proteases and integration at these gene sites to replace the respective genes serves to integrate the heterologous sequence of interest while also inactivating the protease. The gene maps for each of amyE, nprE, apr and wprA on the B. subtilis strain 105 genome are shown in FIG. 2. Native strain 105 sequences for each of nprE, apr and wprA on the B. subtilis strain 105 genome are provided above in Example 11. The amyE sequence is provided in Example 12 and as SEQ ID NO: 111.

### EXAMPLE 15

### Production of Other Biomolecules and/or Heterologous Proteins

[0479] Native B. subtilis strain 105 is genetically modified to express a number of biomolecules and heterologous proteins. Several classes of biolomelcules and heterologous proteins are provided and described below.

### I. Lysins

[0480] The desired biomolecule may be a biomolecule with anti-infective activity. The anti-infective activity could be lysis of pathogenic bacteria by a lytic enzyme, for example from a bacteriophage, with specificity to a certain genus of pathogenic bacteria. Suitable and exemplary lysins are known to one skilled in the art and available. Phage associated lytic enzymes have been identified and cloned from various bacteriophages, each shown to be effective in killing specific bacterial strains. U.S. Pat. Nos. 7,402,309, 7,638,600 and published PCT Application WO2008/018854 provides distinct phage-associated lytic enzymes useful as antibacterial agents for treatment or reduction of Bacillus anthracis infections. U.S. Pat. No. 7,569,223 describes lytic enzymes for Streptococcus pneumoniae. Lysin useful for Enterococcus (E. faecalis and E. faecium, including vancomycin resistant strains) are described in U.S. Pat. No. 7,582,291. Lysins are unique in that they are generally bacterial species specific and do not effect or kill normal gut etc bacterial flora, thus it is likely that the normal flora will remain essentially intact (M. J. Loessner et al (1995) Mol Microbiol 16, 1231-41). Targeting bacterial pathogens that colonize the gastrointestinal tract with Bacillus strain 105 modified to produce one or more lysins directed against these gut or intestinal tract pathogens is an application of the system and methods.

[0481] Lytic enzymes for expression by genetically modified B. subtilis strain 105 may include PlyCM, a lytic enzyme targeting Clostridium perfringens, encoded by a sequence of: (SEQ ID NO: 88)

| | |
|---|---|
| 1 | ATGGAAAGCC GTAATAACAA TAACCTGAAG GGCATCGATG TGAGCAACTG GAAGGGCAAC |
| 61 | ATCAATTTTC AAAGCGTCAA AAATGACGGT GTTGAAGTTG TTTACATTAA GGCAACCGAA |
| 121 | GGCAACTACT TCAAAGACAA ATATGCTAAG CAAAACTACG AGCGCGCTAA AGAACAGGGT |
| 181 | CTGCGTGTGG GCTTCTACCA CTTTTTCCGC GCAAACAAAG GTGCCAAAGA TCAGGCGAAC |
| 241 | TTCTTCGTGA ATTACCTGAA CGAAATCGGT GCGGTCAATT ATGACTGTAA ACTGGCACTG |
| 301 | GACATCGAGA CTACCGAAGG CGTCGGTGCG CGTGACCTGA CCTCTATGTG CATCGAGTTC |
| 361 | CTGGAAGAGG TGAAGCGTAT TACGGGTAAG GAAGTTGTCG TGTACACCTA TACCAGCTTC |
| 421 | GCGAACAATA ATCTGGATTC CCGTCTGTCT AGCTATCCGG TGTGGATTGC GCACTATGGC |
| 481 | GTCAACACCC CGGGTGCGAA CAATATCTGG AGCGAGTGGG TGGGTTTCCA GTACAGCGAG |
| 541 | AATGGCTCCG TCGCCGGTGT CAGCGGTGGC TGCGATATGA ACGAATTTAC CAATGGTATC |
| 601 | TTTATTGACT CGAACAATTT CACGTTGGAC AATGCAACGA CCAAAAATGT TAGCATTAAG |
| 661 | CTGAACATTC GCGCCAAGGG TACGACCAAC AGCAAAGTTA TTGGTAGCAT TCCGGCGAAC |
| 721 | GAAAAGTTTA AGATCAAATG GGTTGATGAA GATTACCTGG GTTGGTATTA CGTTGAGTAT |
| 781 | AACGGTATCG TGGGTTACGT TAACGCCGAT TACGTCGAGA AACTGCAAAT GGCGACCACG |
| 841 | CATAATGTTA GCACCTTTCT GAATGTACGC GAGGAGGGTT CCTTGAATAG CCGTATTGTG |
| 901 | GACAAGATCA ACACTGGCGA CATCTTTCGT ATTGACTGGG TTGATAGCGA TTTCATTGGT |
| 961 | TGGTATCGTG TGACGACGAA AAACGGCAAG GTCGGCTTTG TTAATGCAGA GITTGTGAAA |
| 1021 | AAGTTGTAA |

[0482] CP025C, a lytic enzyme targeting Clostridium perfringens, encoded by a sequence of: (SEQ ID NO: 89)

| | |
|---|---|
| 1 | ATGTCGAAGA TTTTTGGTTT AGATGCGGGT CATTGTACGA GCGGCGCAGA TACGGGTGCG |
| 61 | CAGGGCAATG GTTACAAAGA ACAAGACTTG ACCCGTCAAG TTGTTACCTA TCTGAGCGAA |
| 121 | TACTTGGAGA AAGAGGGCCA CACTACCAAG TACTGCCATT GCAATAGCGC GAGCACGGTT |
| 181 | AACGAATCCC TGCGCTATCG TGTGAACAAA GCCAACTCCA TCGGTGTCGA CTACTTCGTG |
| 241 | AGCATCCACC TGAACGCCGG TGGCGGCGTT GGTACCGAAA CGTACATCTG CGCGCGTGGC |
| 301 | GGCGAGGCCG AGCGCGTGGC GAAACGCGTC AATTCTAAAC TGGTGCAGTA CGGTTATCGT |
| 361 | GACCGTGGTG TCAAGGTTGG TAATCTGTAT GTGATTAAGA ACACCAATGC ACCGGCTATC |
| 421 | CTGGTTGAGA TCTGTTTCAT TGACAGCAGC AGCGATGTGG CAAAGTTTAA CGCGAAGGCA |
| 481 | ATCGCGAAAG CGATTGCTGA GGGTCTGCTG GATAAAACCA TTGGTGAAGT CGAGAATAAG |
| 541 | TAA |

[0483] Lysostaphin is an antimicrobial lytic peptide originally isolated from Staphylococcus simulans and function as a bacteriocin (bacterial killing) against various bacteria, particularly Staplyococcus bacteria (Kumar, J. K. (2008) Appl. Microbiol. Biotechnol. 80:555-561.; do Carmo de Freire Bastos, M et al (2010) Pharmaceuticals 3: 39-1161; doi:10.3390/ph3041139). The cell-wall degrading activity of lysostaphin is primarily due to a glycylglycine endopeptidase activity, which lyses many staphylococcal strains. Like many lysins and antimicrobial lytic peptides, the lysostaphin molecule consists of two distinct domains: (i) an N-terminal peptidase domain responsible for the catalytic activity of the protein and (ii) a C-terminal targeting domain (CWT) involved in binding to the peptidoglycan substrate. The C-terminal 92 amino acid residues of lysostaphin are dispensable for enzymatic activity but necessary and sufficient for directing lysostaphin to the cell wall envelope of S. aureus. The amino acid sequence of mature lysostaphin is as follows:

(SEQ ID NO: 90)
AATHEHSAQWLNNYKKGYGYGPYPLGINGGMHYGVDFFMNIGTPVKAIS
SGKIVEAGWSNYGGGNQIGLIENDGVHRQWYMHLSKYNVKVGDYV
KAGQIIGWSGSTGYSTAPHLHFQRMVNSFSNSTAQDPMPFLKS
AGYGKAGGTVTPTPNTGWKINKYGTLYKSESASFTPNTDIITR
TTGPFRSMPQSGVLKAGQTIHYDEVMKQDGHVWVGYTGNSG
QRIYLPVRTWNKSTNTLGVLWGTIK

### II. Antibacterial Peptides

[0484] Numerous peptides having inherent antibacterial activity have been described. Antimicrobial peptides (AMPs) present an alternative to classical antibiotics. Bacteriocins are a group of antimicrobial peptides produced by bacteria, capable of controlling clinically relevant susceptible and drug-resistant bacteria. Bacteriocins are proteinaceous or peptidic toxins produced by bacteria to inhibit the growth of similar or closely related bacterial strain. They are structurally, functionally. and ecologically diverse. A wide range of antimicrobial peptides is secreted in plants and animals to challenge attack by foreign viruses, bacteria or fungi (Boman, H. G. (2003) J. Intern. Med. 254 (3):197-215). These form part of the innate immune response to infection, which is short term and fast acting relative to humoral immunity.

[0485] AMPs have been found in all kingdoms of life, not just in bacteria, are part of the innate immunity and represent the first line of defense in an infection (Zasloff M. (2002) Nature 415: 389-95). Despite their diversity in origin and sequence, many AMPs, particularly cationic antimicrobial peptides, generally have a substantial proportion of hydrophobic amino acids (=>30%), an overall positive charge (+2 to +11), and are relatively short consisting of 10-50 amino acids (Hancock R E W, Sahl H-G (2006) Nat Biotech 24:1551-1557). Protamines or polycationic amino acid peptides containing combinations of one or more recurring units of cationic amino acids, such as arginine (R), tryptophan (W), lysine (K), even synthetic polyarginine, polytryptophan, polylysine, have been shown to be capable of killing microbial cells. These peptides cross the plasma membrane to facilitate uptake of various biopolymers or small molecules (Mitchell D J et al (2002) J Peptide Res 56(5):318-325). Based on these properties, AMPs are able to fold into amphiphilic three-dimensional structures and are often based on their secondary structure categorized into α-helical, β-sheet or peptides with extended/random coil structure. Most of the so far characterized AMPs belong to the family of the α-helical or β-sheet peptides (Takahashi D, Shukla S K, Prakash O, Zhang G. (2010) Biochimie pp. 1236±1241; Nguyen L T, Haney E F, Vogel H J. (2011) Trends in Biotechnology pp. 464-472.

### A. Mersacidin

[0486] Mersacidin is a peptide having antibacterial activity and is a bacteriocin. Some mersacidin peptides have been identified and characterized from Lactobacillus, particularly LactoBacillus reuteri. The probiotic and direct feed microbials L reuteri strains 3630 and 3632, and mersacidin peptides therefrom, have been described and detailed in WO 2020/163398, published Aug. 13, 2020, US 2022/0088094 published Mar. 24, 2022, and US 2022/0125860 published Apr. 28, 2022.

[0487] B subtilis strain 105 is modified to produce an antibacterial peptide mersacidin, partiocularly mersacidin identified from L. reuteri strain 3632. Nucleic acid encoding a mersacidin (mersacidin-E1) is: (SEQ ID NO: 91)

| | |
|---|---|
| 1 | atggacaaag aagaattaga aaaaattgta ggtaataact ttgaggaaat gagtttacaa |
| 61 | aaaatgacag aaattcaagg tatgggtgaa taccaagtgg attcaacacc agcagcttct |
| 121 | gcgatttcac gggcaacaat tcaagtatca cgtgcatctt ctggaaaatg tctaagttgg |
| 181 | ggtagtggtg cagcatttag tgcttatttt actcataaaa gatggtgcta g |

[0488] This nucleic acid encodes a polypeptide: (SEQ ID NO: 92)

MDKEELEKIVGNNFEEMSLQKMTEIQGMGEYQVDSTPAASAISRATIQV
SRASSGKCLSWGSGAAFSAYFTHKRWC

[0489] Nucleic acid encoding another mersacidin (mersacidin-E2) is: (SEQ ID NO: 93)

| | |
|---|---|
| 1 | atggaagaaa aagaattaga aggtgtaata gggaattcgt ttgaaagtat gactgtagag |
| 61 | gaaatgacaa aaattcaagg tatgggtgaa tatcaagtag attcgacgcc tggatatttt |
| 121 | atggaaagtg ctgccttttc agctcttaca gccaatataa caagacatgc tatgcatcat |
| 181 | cattaa |

[0490] This nucleic acid encodes a polypeptide: (SEQ ID NO: 94)

MEEKELEGVIGNSFESMTVEEMTKIQGMGEYQVDSTPGYFMESAAFSAL
TANITRHAMHHH

### B. Cathelicidins AND CAP18

[0491] Cathelicidins represent a novel family of gene-encoded antimicrobial peptides in vertebrates, and play key roles in host immune response to microbial infections (Reddy, K et al (2004) Int J Antimicrob Agents 24:536-547, doi:10.1016/j.ijantimicag.2004.09.005). Due to their potent antimicrobial activities and bacterial resistance, cathelicidin-derived peptides are regarded as potential alternatives to traditional antibiotics (Hancock R E and Sahl H G (2006) Nat Biotechnol 24:1551-1557, doi:10.1038/nbt1267). They usually possess a broad spectrum antimicrobial activity against bacteria including clinical isolated drug-resistant strains, enveloped viruses, fungi, and even parasites (Giacometti, A et al (2003) J Antimicrob Chemother 51:843-847, doi:10.1093/jac/dkg149; Rapala-Kozik M et al (2015) Infect Immun 83:2518-2530, doi:10.1128/IAI.00023-15; Tripathi S et al (2014) J Leukoc Biol 96:931-938, doi:10.1189/jlb.4A1113-604RR)

[0492] Cathelicidins are generally characterized by a N-terminal signal peptide, a highly conserved cathelin domain followed by a C-terminal mature peptide with remarkable structural variety (Zanetti, M et al (2000) Adv Exp Med Biol 479:203-218, doi:10.1007/b112037). Most cathelicidins display hydrophobic and cationic traits, which bestow these small peptides a unique antimicrobial mechanism different from the traditional antibiotics, that is, cathelicidins readily adhere to the negatively charged bacterial membranes and form a lipophilic anchor inducing membrane disruption and cell death within several minutes, limiting the opportunity for development of drug resistance through bacterial gene mutation (Reddy, K et al (2004) Int J Antimicrob Agents 24:536-547, doi:10.1016/j.ijantimicag.2004.09.005; Ling G et al (2014) PloS ONE 9,e93216, doi:10.1371/journal.pone.0093216)

[0493] More recent evidence suggests that in addition to their antimicrobial effect, cathelicidins also possess anti-inflammatory activities in the process of pathogen infections (Bowdish, D M et al (2005) J Leukocyte Biol 77:451-459, doi:10.1189/jlb.0704380; Finlay B B and Hancock R E (2004) Nat Rev Microbiol 2:497-504, doi:10.1038/nrmicro908). Cathelicidin-derived peptides have great potential to be exploited as medical coating materials and antimicrobial agents for controlling various infections (Ong Z Y et al (2013) Adv Funct Mater 23:3682-3692, doi:10.1002/marc.201300538; Shukla A et al (2010) Biomaterials 31:2348-2357, doi:10.1016/j.biomaterials.2009.11.082).

[0494] A cathelicidin (Hc-CATH) showing potent bactericidal activity from the sea snake, Hydrophis cyanocinctus, has been described, consisting of 30 residues and mainly adopting an alpha-helical conformation (Wei L et al (2015) J Biol Chem 290:16633-16652, doi:10.1074/jbc.M115.642645). Peptide variants and hybrid peptides of the Hc-CATH have been described (Yu H et al (2017) Nature Scientific Reports 7:2600; DOI:10.1038/s41598-017-02050-2).

[0495] CAP18, originally isolated from rabbit neutrophils, demonstrates antimicrobial activity against a broad range of pathogenic bacteria, is highly thermostable and showed no hemolytic activity in vitro (Ebbensgaard A, Mordhorst H, Overgaard M T, Nielsen C G, Aarestrup F M, Hansen E B. (2015) PLoS One 10:e0144611). In addition, a recent study evaluated a potential therapeutic effect of CAP18 against red mouth disease caused by Y. ruckeri in juvenile rainbow trout either by oral administration or intraperitoneal injection, and injection of CAP18 into juvenile rainbow trout before exposure to Y. ruckeri was associated with lower mortality compared to non-treated fish (Chettri J K, Mehrdana F, Hansen E B, Ebbensgaard A, Overgaard M T, Lauritsen A H, et al. (2017) J Fish Dis. 40:97±104). CAP18 has the potential to act as lead peptide for further development and optimization.

[0496] Antibacterial activity of the cathelicidin, cationic antimicrobial protein of 18 kDa (CAP18), was originally isolated from rabbit granulocytes. The C-terminal 37 amino acids of rabbit CAP18 make up the lipopolysaccharide-binding domain and synthetic CAP18₁₀₆₋₁₄₂ has been shown to have broad antimicrobial activity against both gram-positive and gram-negative bacteria, including Staphylococcus aureus, Streptococcus pneumoniae, Escherichia coli, Pseudomonas aeruginosa and Salmonella typhimurium (Larrick J W et al (1993) Antimicrobial Agents Chemotherapy 37(12):2534-2539).

[0497] The rabbit CAP8 37 amino acid peptide has the sequence: (SEQ ID NO: 95)

GLRKRLRKFRNKIKEKLKKIGQKIQGLLPKLAPRTDY

[0498] Antimicrobial activity of human CAP18 peptides has been assessed (Larrick J W et al (1995) Immunotechnology 1:65-72). Human CAP 18, or cathelicidin peptide, is also denoted LL37 and has been shown to modulate immunity during bacterial infections by recruiting neutrophils, monocytes and T-cells (Ciornei C D et al (2005) Agents Chemother 49:2845-2850, doi:10.1128/AAC.49.7.2845-2850.2005; De Y et al (2000) J Exp Med 192:1069-1074, doi:10.1084/jem.192.7.1069). The Human CAP18 peptide LL37 has the following sequence: LLGDFFRKSKEKIGKEFKRIVQRIKDFLRNLVPRTES (SEQ ID NO: 96)

[0499] Other antimicrobial cathelicidins of different species include BMAP28 (CATHL5; bovine), Bac7 (CATHL3; bovine rumen), k9Cath (canine) and PMAP36 (porcine).

### III. Antibodies—Including Single Chain or Single Domain Antibodies

[0500] Nanobodies (also denoted VHH) are small, low molecular weight, single-domain, heavy-chain only antibody found in camelids. Owing to its smaller size, genes of these proteins are easy to clone inside a plasmid. Therefore, by using molecular cloning techniques, nanobodies against various antigens can be presented in the systemic circulation. B. subtilis bacteria strain 105 is modified to include a heterologous coding region encoding a desired biomolecule which can be a nanobody, or can encode one or more nanobodies. The desired biomolecule may be a biomolecule with anti-infective activity. The anti-infective activity can be inhibition or neutralization of toxins produced by pathogens. The inhibition or neutralization can be accomplished with single chain antibodies.

[0501] For example, LactoBacillus has been described as an expression system for single chain antibodies directed against host attachment factors (WO2012/019054). The L reuteri strains 3630 and 3632 are described and detailed as probiotic strains in WO 2020/163398 published Aug. 13, 2020, and in corresponding US 2022/0088094 published Mar. 24, 2022 and US 2022/0125860 published Apr. 28, 2022. A live delivery system based on L reuteri strain 3630 or 3632 is described and detailed in PCT/US2020/016522 filed Feb. 4, 2020, published as WO 2020/163284 Aug. 13, 2020. This application describes native bacterial promoters, signal sequences suitable for expression and vectors and bacterial genome sites/genes for integration to generate stable modified strains. Recombinant LactoBacillus (L reuteri strain 3630 and L reuteri strain 3632) delivering nanobodies directed against Clostridium perfringes NetB and alpha toxin have been described and shown to confer protection against necrotic enteritis in poultry (Gangaiah D et al MicrobiologyOpen 2022; 11:e1270,doi.org/10.1002/mbo3.1270).

### A. Clostridium Perfringes Toxin Antibodies

[0502] Toxins to be targeted by single chain antibodies include Clostridium perfringens alpha toxin and NetB. Camelid heavy-chain only (VHH) antibodies against C. perfringens alpha toxin and NetB are generated. Briefly, two llama calves each are immunized with either recombinant alpha toxin or NetB variant W262A. Neither of these immunogens are haemolytic. The immunized llamas are boosted twice with toxin peptides. On days 44 and 72 after the primary immunization, blood samples are taken and RNA isolated for phage library construction. Phage libraries are screened for binding activity towards each of the two toxins. The candidate antibodies are sequenced and further screened in bioassays.

### Alpha Toxin Antibodies

[0503] Alpha toxin causes membrane damage to a variety of erythrocytes and cultured cells. It is preferentially active towards phosphatidylcholine (PC or lecithin) and sphingomyelin (SM), two major components of the outer leaflet of eukaryotic cell membranes. The N-terminal domain possesses full activity towards phosphatidylcholine but lacks the sphingomyelinase activity and is not haemolytic or cytotoxic. The C-terminal domain is devoid of enzymatic activity, but interaction between the N- and C-terminal domain is essential to confer sphingomyelinase activity, haemolytic activity and cytotoxicity to the toxin. Although alpha toxin is a potent haemolysin, the lysis of erythrocytes is only seen after intravenous administration of toxin in experimental animals or in cases of clostridial septicaemia.

[0504] The inhibitory capacity of the VHH antibodies directed towards alpha toxin on the alpha toxin lecithinase activity is determined by measuring its effect on egg yolk lipoproteins. Fresh egg yolk is centrifuged (10,000×g for 20 min at 4° C.) and diluted 1:10 in PBS. The ability of the VHHs to neutralize the alpha toxin activity is assessed by pre-incubating a two-fold dilution series of the VHHs (two wells per dilution, 5 μM starting concentration) with a constant amount of alpha toxin (either 5 μg/ml recombinant alpha toxin or 3.33×10⁻⁴U/μl alpha toxin from Sigma, P7633) for 30 minutes at 37° C. prior to the addition of 10% egg yolk emulsion. As a positive control, serum from calves immunized with the recombinant alpha toxin is used, starting from a 1:4 dilution. After incubation at 37° C. for 1 hour, the absorbance at 650 nm (A₆₅₀) was determined. Alpha toxin activity is indicated by the development of turbidity which results in an increase in absorbance.

[0505] Control serum is able to neutralize the lecithinase activity of both the commercial and the recombinant alpha toxin. An eight-fold dilution of the antiserum (corresponding to 3.12% serum) is able to completely neutralize the alpha toxin lectihinase activity of the recombinant alpha toxin, whereas only the highest dilution of the antiserum (corresponding to 25% serum) is able to completely neutralize the lecithinase activity of the commercial alpha toxin. Difference in inhibitory capacity is observed between five candidate VHH antibodies. VHH EAT-1F3 had no effect on the lecithinase activity of either of the alpha toxins. The neutralizing capacity of EAT-1A2 and EAT-1C8 is very similar and is the same for both the recombinant and commercial alpha toxin. The maximal inhibitory capacity is preserved until a 32-fold dilution (0.16 μM VHH) of the VHHs. However, both EAT-1A2 and EAT-1C8 are unable to completely neutralize the lecithinase activity, resulting in 40% to 50% residual lecithinase activity. Two other VHHs, EAT-1F2 and EAT-1G4 show a difference in neutralizing capacity towards the recombinant and the commercial alpha toxin. EAT-1F2 has a high neutralizing capacity towards the recombinant alpha toxin but is unable to completely neutralize the commercial alpha toxin, resulting in about 25% residual lecithinase activity. In contrast to EAT-1F2, EAT-1G4 neutralizes 100% of the lecithinase activity of the commercial alpha toxin, but is less capable of neutralizing the recombinant alpha toxin.

[0506] Neutralization of the alpha toxin haemolytic activity by the VHH antibodies directed towards alpha toxin is determined by measuring its effect on sheep erythrocytes. Similar to the inhibition of the alpha toxin lecithinase activity, the ability to neutralize the haemolytic activity is assessed by pre-incubating a two-fold dilution series of the VHH antibodies (two wells per dilution, 5 μM starting concentration) with a constant amount of alpha toxin (6.25×10⁻⁵ U/μl alpha toxin from Sigma, P7633) for 30 minutes at 37° C. prior to the addition of 1% sheep erythrocytes. As a positive control, serum from calves immunized with the recombinant alpha toxin is used, starting from a 1:4 dilution. After incubation at 37° C. for 1 hour, the plates are centrifuged to pellet intact red blood cells. The supernatant is transferred to a new 96 well plate and the A₅₅₀ is determined. Alpha toxin activity is indicated by the increase in absorbance due to release of haemoglobin from the erythrocytes.

[0507] The inhibitory capacity of the VHH antibodies towards the alpha toxin haemolytic activity is determined using the commercial alpha toxin only, as the recombinant alpha toxin shows no haemolytic activity. Up to a 16-fold dilution of the control serum (corresponding to 1.56% serum) completely inhibits the alpha toxin haemolysis. To the contrary, none of the candidate VHHs has an effect on the haemolytic activity of alpha toxin. Because the control serum contains polyclonal antibodies, whereas the VHHs are monoclonal, the combined effect of all 5 VHHs towards alpha toxin is determined (1 μM of each VHH in the highest dilution, corresponding to 5 μM VHHs in total). Combining the VHHs has no effect on the alpha toxin haemolysis.

[0508] Based on the above results, VHH antibodies EAT-1F2 and EAT-1G4 are selected for further characterization and expression. The peptide sequence of EAT-1F2 is: (SEQ ID NO: 97)

EVQLVESGGGLVQAGGSLRLSCAGSGRTGSLYSMGWFRQAPGKEREFVA
AITWRPSSTYYADSVKGRFTISRDDAKNTVYLQMNSLKPEDTAVYFCAA
RPRGGLSPTPQAYDYWGQGTQVTVSSAAASGSLEQKLISEEDLNGAAHH
HHHHGAA

[0509] The peptide sequence of EAT-1G4 is: (SEQ ID NO: 98)

EVQLVESGGGLVQPGGSLRLSCAASGSIATINDMGWFRQAPGKQRDWVA
TIVSDGSTAYADSVKGRFTISRDNAKNTVYLQMNSLKPEDTAVYYCSAR
RHYGQGTQVTVSSAAASGSLEQKLISEEDLNGAAHHHHHHGAA

[0510] A person of skill in the art would recognize that, because of the redundancy of the genetic code, multiple nucleic acid sequences could encode the above peptides. However, an exemplary sequence encoding EAT-1F2 is: (SEQ ID NO: 99)

| | |
|---|---|
| 1 | GAGGTGCAGC TCGTGGAAAG TGGCGGAGGT CTTGTTCAGG CTGGGGGATC GCTCCGTCTG |
| 61 | AGCTGTGCGG GGTCTGGCAG AACAGGTAGT CTCTATTCCA TGGGTTGGTT TCGGCAGGCC |
| 121 | CCGGGTAAGG AGCGGGAGTT CGTTGCAGCG ATTACGTGGA GGCCCAGCTC TACCTACTAC |
| 181 | GCGGACAGCG TAAAGGGACG ATTCACCATT AGTAGAGACG ACGCAAAGAA TACTGTATAT |
| 241 | TTGCAGATGA ATTCGTTGAA GCCTGAGGAC ACCGCTGTCT ATTTTTGCGC GGCGCGACCG |
| 301 | AGGGGCGGTC TCTCCCCGAC ACCTCAAGCA TATGATTACT GGGGACAAGG GACCCAAGTC |
| 361 | ACTGTATCCA GTGCGGCCGC GAGCGGCAGC CTTGAACAAA AGCTGATAAG CGAGGAGGAT |
| 421 | CTCAATGGTG CTGCACATCA TCATCACCAT CACGGGGCAG CG |

[0511] Exemplary sequence encoding EAT-1G4 is: (SEQ ID NO: 100)

| | |
|---|---|
| 1 | GAAGTTCAGC TTGTAGAGTC CGGTGGGGGT CTTGTACAGC CCGGCGGGAG CTTGCGACTC |
| 61 | TCATGCGCTG CTTCCGGAAG CATTGCGACA ATAAATGATA TGGGTTGGTT TAGACAAGCC |
| 121 | CCCGGGAAGC AGCGTGACTG GGTCGCGACT ATTGTGAGTG ACGGCAGCAC GGCTTATGCG |
| 181 | GACTCAGTGA AAGGGAGATT TACGATTTCG CGAGATAACG CGAAAAACAC TGTATACCTG |
| 241 | CAGATGAATT CACTCAAGCC GGAAGATACA GCTGTGTATT ATTGTTCTGC CCGACGGCAC |
| 301 | TACGGACAGG GGACCCAGGT CACAGTCTCG AGCGCTGCCG CCAGTGGGTC ACTCGAGCAG |
| 361 | AAGCTGATAT CAGAGGAGGA CCTTAACGGT GCGGCGCACC ATCACCACCA TCATGGTGCG |
| 421 | GCG |

### NetB Antibodies

[0512] NetB is a heptameric beta-pore-forming toxin that forms single channels in planar phospholipid bilayers. The NetB activity is influenced by membrane fluidity and by cholesterol, which enhances the oligomerization of NetB and plays an important role in pore formation. NetB has high haemolytic activity towards avian red blood cells.

[0513] Neutralization of the NetB haemolytic activity by camelid VHH antibodies directed towards NetB is determined by measuring NetB-mediated lysis of chicken erythrocytes. The ability to neutralize NetB haemolytic activity is assessed by pre-incubating a two-fold dilution series of the VHH antibodies (two wells per dilution, 5 μM starting concentration) with a constant amount of NetB toxin (20 μg recombinant NetB) for 30 minutes at 37° C. prior to the addition of 1% chicken erythrocytes. The non-toxic NetB variant W262A is included as a negative control as this variant displays no haemolysitic activity. Positive control serum from rabbits immunized with the recombinant NetB (wild type NetB) is used, starting from a 1:4 dilution. After incubation at 37° C. for 1 hour, the plates are centrifuged to pellet intact red blood cells. The supernatants is transferred to a new 96 well plate and the A₅₅₀ is determined. NetB activity is indicated by the increase in absorbance due to release of haemoglobin from the erythrocytes.

[0514] The control serum is able to neutralize the haemolytic activity of NetB. VHH antibodies ENB-1F4 and ENB-1F10 have no effect on the NetB haemolysis. ENB-1B9 has intermediate inhibitory capacity, while ENB-1D 11 and ENB-1A4 are able to neutralize the NetB haemolysis up to a 4- to 8-fold dilution (1.25 μM-0.625 μM VHHs).

[0515] Based on the above results, VHH antibodies ENB-1A4 and ENB-1D11 are selected for further characterization and bacterial expression. The peptide sequence of ENB-1A4 is: (SEQ ID NO: 101)

EVQLVESGGGLVQAGGSLRLSCAASGSIFSTNVMGWYRQAPGKQREFVA
GITIGGTARYPDSVKGRFTISRDNTQNTVYLQMNNLKPEDTAVYYCNAV
LPSDQRRWSWGQGTQVTVSSAAASGSLEQKLISEEDLNGAAHHHHHHGA
A

[0516] The peptide sequence of ENB-1D11 is: (SEQ ID NO: 102)

EVQLVESGGGLVQTGGSLRLSCTASGTIDMTYGLIWYRQAPGKERELVA
SIRRDGRTNYADSVKGRFTISIDNAKNSIHLQMNSLKPDDTARYYCNSP
YHALWGQGTQVTVSSAAASGSLEQKLISEEDLNGAAHHHHHHGAA.

[0517] A person of skill in the art would recognize that, because of the redundancy of the genetic code, multiple nucleic acid sequences could encode the above peptides. However, an exemplary sequence encoding ENB-1A4 is: (SEQ ID NO: 103)

| | |
|---|---|
| 1 | GAGGTACAAC TGGTTGAGAG TGGGGGTGGT TTGGTGCAAG CCGGAGGTTC CTTACGTTTG |
| 61 | TCTTGCGCGG CTAGTGGGAG CATCTTTTCA ACAAACGTAA TGGGGTGGTA CCGCCAAGCC |
| 121 | CCAGGTAAGC AGCGGGAATT TGTGGCCGGG ATAACGATCG GAGGAACTGC GAGGTATCCT |
| 181 | GATAGTGTGA AAGGGCGTTT CACAATTAGT CGAGATAATA CACAGAATAC TGTCTATCTC |
| 241 | CAAATGAATA ATCTCAAGCC CGAAGACACA GCAGTTTATT ATTGTAATGC CGTTCTCCCC |
| 301 | TCTGATCAGC GTCGATGGAG CTGGGGACAA GGCACCCAGG TTACGGTTAG CAGCGCGGCA |
| 361 | GCGTCTGGTT CGCTCGAGCA AAAGCTCATA TCTGAGGAGG ACCTGAACGG GGCAGCCCAC |
| 421 | CATCACCACC ATCACGGAGC AGCT |

[0518] An exemplary sequence encoding ENB-1G4 is: (SEQ ID NO: 104)

| | |
|---|---|
| 1 | GAGGTACAGC TGGTGGAGTC CGGCGGTGGT TTGGTGCAAA CCGGGGGTAG TCTGCGGCTT |
| 61 | AGTTGCACGG CGTCTGGGAC AATAGACATG ACTTATGGTC TCATATGGTA CAGGCAAGCG |
| 121 | CCTGGGAAAG AGAGGGAACT CGTTGCGAGT ATCAGAAGGG ACGGCCGCAC AAATTACGCT |
| 181 | GATTCAGTGA AAGGGCGCTT CACTATCTCG ATCGATAATG CGAAAAACAG TATTCACCTT |
| 241 | CAAATGAACT CCCTTAAGCC CGATGATACC GCCAGGTATT ATTGCAACAG CCCATATCAC |
| 301 | GCACTTTGGG GTCAGGGTAC GCAGGTAACA GTGTCTAGTG CGGCAGCCTC TGGTAGTTTG |
| 361 | GAGCAAAAGT TGATAAGTGA GGAGGACTTA AATGGGGCGG CACATCACCA CCACCATCAT |
| 421 | GGGGCGGCT |

### IV. Delivering Antigens as a Therapeutic Vaccine

[0519] Delivery of antigens in an immunomodulating, immune stimulation or vaccine strategy is an important and viable application of the platform of the present invention. B. subtilis strain 105 is modified and utilized to produce antigens which can serve as immunogenic polypeptides to stimulate an immune reaction and promote immunity, such as immunity against infection by an infectious agent or pathogen in an animal. In some embodiments, B. subttilis strain 105 is modified and utilized to produce one or more or multiple relevant antigens which serve individually or collectively as immunogenic polypeptides to stimulate an immune reaction and promote immunity, particularly enhanced immunity or a broader more effective immune response against an infectious agent or pathogen, including in applications as an immunogen, immune stimulator or vaccine.

[0520] Avian coccidosis is a common poultry disease caused by Eimeria. Eimeria is a genus of parasites that includes various species capable of causing the disease coccidiosis in animals such as cattle, poultry, dogs (especially puppies), cats (especially kittens), and smaller ruminants including sheep and goats. Eimeria species infect a wide variety of hosts. The most prevalent species of Eimeria causing coccidiosis in cattle are E. bovis, E. zuernii, and E. auburnensis. In a young, susceptible calf it is estimated that as few as 50,000 infective oocysts can cause severe disease. Eimeria infections are particularly damaging to the poultry industry and costs the United States more than $1.5 billion in annual loses. The most economically important species among poultry are E. tenella. E. acervulina, and E. maxima.

[0521] To generate and provide a immunogenic composition or coccidial vaccine for use and application in poultry, B. subtilis strain 105 is modified to deliver cross-protective antigens covering Eimeria parasites including Eimeria tenella, E. maxima and E. acervulina. Eimeria antigens including Eimeria tenalla elongation factor-1a; EtAMA1; EtAMA2; Eimeria tenella 5401; Eimeria acervuline lactate dehydrogenase antigen gene; Eimeria maxima surface antigen gene; Glyceraldehyde 3-phosphate Dehydrogenase (GAPDH); Eimeria common antigen 14-3-3 are cloned in a plasmid or integrated in the genome of strain 105 as the applicable gene of interest. Expression of the Eimeria antigens delivered by the B subtilis 105 in poultry provides vectored delivery of an immunogen to stimulate immune response and provise protection or immunity against Eimeria in the animals.

[0522] Cocci antigen sequences:

EmGAPDH
(SEQ ID NO: 105)
ATGGTGTGCCGCATGGGCATCAACGGATTCGGGAGAATTGGAAGGCTGGTGTTTCGGGCCGCTATGGCAAACCC
CGAAGTGGAGGTGGTGGCCGTGAATGATCCTTTCATGGACGTGCAGTACATGGCCTACCAGCTGAAGTACGATAG
CGTGCACGGCAAATTTCCTGGAGAGGTGTCCGTGAAGGACGGGAATCTGGTGGTGGAAGGCAAGACTATCCAGG
TGTTCGCTGAGAAAGATCCTGCAGCCATTCCATGGGGGAAAGTGGGCGCACACTACGTGTGCGAAAGCACAGGG
GTGTTTACTAACAAGGAGAAAGCTGGCCTGCACATCAGCGGCGGAGCTAAGAAAGTGATCATTTCCGCACCCCCT
AAGGATGACACACCAATGTTCGTGATGGGCGTGAATCACGAGGAATACCAGCCCACTCTGCAGGTGGTGAGCAAC
GCATCCTGCACCACAAATTGCCTGGCTCCACTGGCAAAGGTGGTGCACGAAAAATTTGGGATTGTGGAGGGCCTG
ATGACTACCGTGCACGCCATGACCGCTAACCAGCTGACAGTGGATGGACCTAGCAAGGGCGGCAAAGATTGGAG
AGCAGGAAGATGCGCTGGGAGCAACATCATTCCTGCCTCCACAGGAGCTGCAAAGGCTGTGGGGAAAGTGATCC
CATCCCTGAATGGCAAGCTGACTGGAATGGCCTTCAGAGTGCCAACCCCCGATGTGAGCGTGGTGGACCTGACCT
GCAGGCTGTCCAAGCCCGCTAAATACGAAGATATCGTGGCCGCTATTAGAGCAGCCAGCGAGGGACCTCTGAAG
GGCATCCTGGGAGTGACAGAGGAAGAGGTGGTGTCCCAGGATTTCTGCGGCGACAAGAGGAGCTCCATCTTTGA
TGTGAAAGCAGGCATCCAGCTGAACGACAGCTTCGTGAAACTGGTGTCCTGGTACGACAACGAATGGGGATACA
GCAATAGACTGGTGGATCTGGCCATCTACATGTCCAAGAAAGACGGCAATGGAGCTGCACACCATCATCACCACC
ACCACCACCACGGAGCAGCTTGGAGCCACCCCCAGTTTGAGAAGGGGGCAGCCTGA
Ea 14-3-3
(SEQ ID NO: 106)
ATGGGAATCGAGGATATTAAGACACTGCGCGAGGAACACGTGTACCGGGCTAAACTGGCAGAGCAGGCCGAACG
CTACGACGAGATGGCAGAAGCCATGAAGAACCTGGTGGAGAATTGCCTGGATCAGAACAGCTCCACACCCGGCG
GAAAAGGGGACGAACTGACTGTGGAGGAACGGAACCTGCTGAGCGTGGCCTACAAGAATGCAGTGGGAGCAAG
AAGGGCATCCTGGAGAATCATTAGCTCCGTGGAGCAGAAGGAAGCAAACCGGAATCACATGACTAATAAAGCCCT
GGCCGCTAGCTACAGACAGAAGGTGGAGAACGAACTGAATAAAATCTGCCAGGAGATTCTGACCCTGCTGACAG
ATAAACTGCTGCCTAGAACCACAGACAGCGAATCCAGGGTGTTCTACTTTAAGATGAAAGGCGATTACTACAGGT
ACATCAGCGAGTTCTCCAACGAGGAAGGAAAGAAAGCTAGCGCAGAACAGGCCGAGGAATCCTACAAGAGAGCT
ACAGACACTGCCGAGGCTGAACTGCCCAGCACTCACCCTATCAGGCTGGGACTGGCCCTGAACTACTCCGTGTTTT
ACTACGAGATTCTGAATCAGCCACAGAAGGCTTGCGAAATGGCTAAACTGGCATTCGATGACGCAATCACCGAGT
TTGATAGCGTGTCCGAGGAAAGCTACAAGGACTCCACACTGATTATGCAGCTGCTGCGCGATAATCTGACTCTGTG
GACCAGCGACCTGCAGACTCAGGAACAGCAGCAGCAGCCAGTGGGAGAGGGAGCAGAAGCACCCAAAGTGGAG
GCTACTACTGAACAGCAGGGAGCAGCACACCATCATCACCACCACCACCACCACGGAGCTGCATGGTCCCACCCTC
AGTTCGAGAAGGGGGCCGCTTGA
EF-1α
(SEQ ID NO: 107)
ATGGGCAAGGAGAAAACACACATTAATCTGGTGGTGATCGGGCACGTGGATAGCGGCAAGTCCACCACAACTGG
ACACCTGATCTACAAGCTGGGCGGAATTGACAAAAGGACTATCGAGAAGTTCGAGAAAGAAAGCTCCGAAATGG
GAAAGGCCTCCTTTAAATACGCTTGGGTGCTGGATAAGCTGAAAGCTGAGCGCGAACGGGGGATCACAATTGAC
ATCGCACTGTGGCAGTTCGAGACTCCCGCCTTTCACTACACCGTGATCGATGCTCCTGGGCACAGAGACTTTATTA
AAAACATGATCACCGGCACATCCCAGGCAGATGTGGCACTGCTGGTGGTGCCTGCAGACCAGGGCGGCTTCGAA
GGAGCCTTTAGCAAAGAGGGCCAGACAAGGGAACACGCTCTGCTGGCATTCACTCTGGGCGTGAAGCAGATGAT
TGTGGGAATCAACAAAATGGATGCCACTTCCCCTGAGAAGTACAGCGAAGCTAGATTTAATGAGATTCAGGCAGA
AGTGTCCAGGTACCTGAAAACCGTGGGCTACAACCCAGAGAAGGTGCCTTTCGTGCCAATCAGCGGGTTTGTGGG
CGATAACATGGTGGAACGCAGCTCCAATATGGGATGGTACAAGGGGAAAACCCTGGTGGAGGCACTGGACAGCG
TGGAACCCCCTAAGCGCCCAGTGGATAAACCCCTGCGGCTGCCTCTGCAGGACGTGTACAAGATTGGAGGGATCG
GAACTGTGCCTGTGGGAAGAGTGGAGACAGGAGTGCTGAAACCTGGAATGGTGGTGACTTTCGCTCCATCCGGG
CTGCAGACCGAGGTGAAGAGCGTGGAAATGCACCACGCACAGCTGGAACAGGCCGTGCCTGGCGATAATGTGGG
ATTTAACGTGAAGAATGTGTCCGTGAAGGACGTGAAAAGAGGACACGTGGCTAGCGATTCCAAGAATGACCCAG
CAAAAGCCGCTGCAAGCTTCCAGGCCCAAGTGATTGTGCTGCACCACCCCGGGCAGATCAACCCAGGCTACACAC
CCGTGCTGGATTGCCACACTGCCCACATTTCCTGCAAGTTTGCTGATCTGGAGAAACGCCTGGACAGAAGGAGCG
GCAAAGCACTGGAAGATAGCCCAAAGTCCATTAAAAGCGGAGACGCCGCTATCGTGCGGATGGAGCCCAGCAAG
CCTATGTGCGTGGAGGCTTTCATCGAATACCCACCCCTGGGGAGATTTGCAGTGAGGGACATGAAACAGACCATT
GCTGTGGGCGTGATCAAGGCAGTGGAGAAGAAAGAAGCCGGCGGAAAGGTGACAAAATCCGCCCAGAAAGCAG
CCGCTAAGAAAGGAGCAGCACACCATCATCACCACCACCACCACCACGGAGCTGCATGGAGCCACCCACAGTTTG
AGAAGGGAGCAGCTTGA
Em surface antigen
(SEQ ID NO: 108)
ATGGATACTATCAGCTCCCCTCTGAGCTGCCTGGAGCAGATGAACAAAGTGCGGGAAGCCGCTGGCCTGCCCAAA
TTCGTGGAGAATACTCAGCTGCTGCCTTCCGAAGCCCCTAAGACCCCAGATGACTTTTGGGAGAAGCTGTGCGCTA
AAGTGAGAGGCGACCCAGCTACAGAAGCAGTGGGCAGCGCCCCTCAGGGAACTTACGCTTTCTACCCTACCTCCG
AGGATGCCGGAAACTGCACTGCAGCCGTGGAGTTTTGGGAAGGCGGATTCAGCCTGTTTAATGACAAGCTGCCAG
AAAAATACATCGCAAGCTCCCCCAACACCTACAGCAATCAGCGCGCTGTGTCCTTCGTGGCACTGTTTAACCCCAA
ACCTGATGCTTCCGTGCACTGCACATTCGCAAAGTGCCCCAAAACTGCCCCAGAACCTGACCTGGGCGGCAGAAG
GCGCCTGGCTGCAGAAACCCTGAATAGCGTGATCTGCATTACATCCCCTGAGGCTCTGGTGAACGAACAGGCACC
ATTTAGCGAGGATGTGTGGAATAAGATTACTGCTGCTCTGACCGGCGGCGTGAAAGCAGTGGGACCAACAGCCCT
GATTGCTCTGGCAGCACTGGCACTGAGCGCATCCGTGCTGATTGGGGCTGCACACCATCATCACCACCACCACCAC
CACGGAGCAGCTTGGAGCCACCCCCAGTTCGAGAAGGGCGCAGCCTGA
EtAMA1 (extracellular domain)
(SEQ ID NO: 109)
ATGGGATCCTGCGCTGGACCTGCTGCTGGAGTGCAGCACAAGCTGCAGCACAGGCAACAACAGCAGCAGCAGCA
TTCCCACGCAAGCACTTCCCACGCAGCAGCTGTGCTGGCAGCAAGCTCCGATGCTAGCACCGACTCCAATCCTTTC
ATGCAGCCCCCTTACGCTGAGTTCATGGCACGCTTTAACATCCCAAAGGTGCACGGGAGCGGCGTGTACGTGGAT
CTGGGGAATGACAAAGAGGTGAAGGGCAAAATGTACAGAGAACCCGGCGGAAGGTGCCCTGTGTTCGGCAAGA
ACATTGAGTTTTACCAGCCCCTGGATAGCGACCTGTACAAAAATGATTTCCTGGAAAACGTGCCTACCGAGGAAGC
TGCTGCTGCTGCAAAGCCTCTGCCAGGGGGCTTCAACAACAACTTTCTGATGAAGGACAAGAAGCCCTTTAGCCCT
ATGTCCGTGGCTCAGCTGAACAGCTACCCCCAGCTGAAGGCACGGACAGGACTGGGGAAATGCGCCGAAATGAG
CTACCTGACCACAGCCGCTGGCAGCTCCTACAGATACCCCTTCGTGTTTGATAGCAAGAAAGACCTGTGCTACCTG
CTGCTGGTGCCTCTGCAGCGCCTGATGGGAGAGCGGTACTGCAGCACTAGAGGGTCCCCACCCGGCCTGTCCCAC
TTCTGCTTTAAGCCACTGAAAAGCGTGTCCCTGAGGCCCCACCTGGTGTACGGAAGCGCATACGTGGGGGAGCGC
CCTGATGACTGGGAAACAAAGTGCCCAAACAAGGCCGTGAAAGATGCAGTGTTTGGAGTGTGGGAGGGAGGGA
GATGCGAGGAACAGAGACTGAGACTGGGAGCTCAGACTGCAGCTGCTGCAGCCAAAGAAGACTGCTGGGCACTG
GCCTTCAATAACCCCTTTGCTGCATCCGATCAGCCTACTAGCCAGGACGAGGCCGCTACCTCCCCAGGATACTACTT
CCCCAGCATCACTCCTAGCCAGCCAAAGAGCGGCGGAGTGGGAGTGAATTTTGCCTCCTACTACCCTAGCGGAGA
GTGCGTGCTGAGCGGAGAAGTGCCTACATGCCTGCTGCCAAGGCAGGGAGCAGCCGCTTTCACTAGCGTGGGGT
CCCTGGAGGAAGAGGAACTGCCACACTGCGATCCTACATTTCCTGCATCCCTGGGGTCCTGCGACCCAAGCTCCTG
CAAGGCAATTCTGACTGAGTGCAGAGGCGGCAGACTGGTGGAACAGCAGACAGATTGCGTGCCAGAGGACGGC
AGCAAGTGCGAAAGCAAGGGCGGCGGCGGCGCCGCACACCATCATCACCACCACCACCACCACGGAGCTGCATG
GAGCCACCCCCAGTTTGAGAAAGGAGCCGCTTGA

### Example 16

### Engineering Bacteria to Include Biosynthetic Gene Clusters (Bcg)

[0523] A biosynthetic gene cluster (BGC) is a group of genes in bacteria that work together to produce or generate one or more molecules or proteins, or in some instances a protein complex. that provide one or more activity or related activities and/or serve a related or final function. Clustering of a group of genes can permit or enable timed and coordinated synthesis, for example of proteins involved in a pathway. The proteins can be under the control of multiple promoters or transcribed by a single promoter or group of promoters.

A. Engineering of Polyketide Synthase (PKS) Biosynthetic Cluster from LactoBacillus Reuteri into Baciius Subtilis

[0524] Polyketide synthases (PKS) are secondary metabolites produced by biosynthetic gene clusters (BGCs) that assemble simple molecules into complex metabolites that have potential therapeutic value. The gut microbiome encodes for several BGCs that produce secondary metabolites that directly interact with the host immune system. Of particular importance is the BGCs that encode for AhR-activating metabolites. AhR is a ligand-activated transcription factor that recognizes environmental pollutants, dietary compounds (i.e., glucobrassicin and flavonoids), and microbial-derived secondary metabolites (i.e., indole-3-carbinol). Upon ligand binding, AhR translocates into the nucleus to induce target gene expressions. The role of AhR has been extensively studied in relation to metabolism of environmental toxins, but the focus has recently shifted to its role in modulation of the adaptive and innate immune system. AhR is a ligand activated transcription factor that plays a key role in a variety of diseases including amelioration of intestinal inflammation. Ozcam et al have shown that some L. reuteri strains can activate the aryl hydrogen receptor (AhR) and that this activation is associated and correlated with the presence of PKS gene cluster and its metabolite(s) (Ozcam M et al (2019) Appl Environ Microbiology 85(10):e01661-18). Strains that have the PKS biosynthetic gene cluster activate AhR and produce a bright orange pigment. Deletion of the PKS gene cluster results in loss of the abiolity to activate the AhR receptor. AhR activation by L. reuteri has been shown to alleviate E. coli-induced mastitis in mice (Zhao C et al (2021) PLOS Pathogens 17(17):e1009774), and could be an effective approach against mastitis in other animals, particularly lactating animals, such as cattle for example. AhR activity and AhR-expressing micriobiota communications have been multi-factorially implicated, including in modulation of immune tolerance and response, intestinal homeostasis, carcinogenesis and intestinal barrier integrity (Dong F and Perdew G H (2020) Gut Microbes doi.org/10.1080/19490976.202.1859812). AhR has been implicated in various inflammatory- and immune-mediated conditions, such as atopic dermatitis.

[0525] The Bacillus subtilis strain 105 is modified to introduce a biosynthetic gene cluster from LactoBacillus reuteri that encodes for a polyketide synthase which provides and acts as an AhR-activating metabolite. In particular, the LactoBacillus reuteri strain is 3632 (ATCC PTA-126788). The L. reuteri metabolite appears to give an orange pigmentation to the strain and is primarily associated with cell envelope. LactoBacillus reuteri strain is 3632 (ATCC PTA-126788) is described as having a characteristic orange pigment, including in Kumar et al, WO 2020/163398A1, published Aug. 13, 2020, and corresponding US publications are US 2022/0088094 published Mar. 24, 2022 and US 2022/0125860 published Apr. 28, 2022, the entire contents of which are incorporated herein by reference. In a particular aspect, Bacillus subtilis strain 105 is modified to introduce the PKS cluster from Lactobacillus reuteri so as to efficiently produce the candidate AhR-activating metabolite. In particular, the LactoBacillus reuteri strain 3632 (ATCC PTA-126788) contains a BGC that encodes for a full suite of proteins required for synthesis and production of the AhR-activating metabolite. LactoBacillus reuteri strain 3632 is detailed and described, including its full genome nucleic acid sequence in Kumar et al, WO 2020/163398A1, published Aug. 13, 2020, and corresponding US publications are US 2022/0088094 published Mar. 24, 2022 and US 2022/0125860 published Apr. 28, 2022, the entire contents of which are incorporated herein by reference.

[0526] The PKS gene cluster from LactoBacillus reuteri strain 3632 is encoded on a conjugation plasmid of 165 kb. The biosynthetic gene cluster (BGC) contains 15 genes that encode for a full suite of proteins needed for the synthesis of AhR-activating metabolite (TABLE 22). The gene cluster is introduced into B. subtilis strain 105 to enable synthesis and production of active and effective AhR-activating metabolite by the modified B. subtilis strain.

TABLE 22
Genes involved in the synthesis and secretion of mersacidin

| Locus tag | Gene | Description | Remarks |
|---|---|---|---|
| LREU3632_02405 | emrY/pksA | putative multidrug resistance protein EmrY | Transporter |
| LREU3632_02406 | fabF_2/pksB | 3-oxoacyl-[acyl-carrier-protein] synthase 2 | |
| LREU3632_02407 | pksC | acyl carrier protein | |
| LREU3632_02408 | fabG_2/pksD | 3-oxoacyl-[acyl-carrier-protein] reductase FabG | |
| LREU3632_02409 | pksE | Hypothetical protein | |
| LREU3632_02410 | fabZ 3/pksF | 3-hydroxyacyl-[acyl-carrier-protein] | |
| | | dehydratase FabZ | |
| LREU3632_02411 | pksG | Glyoxylase/metallo-beta-lactamase | |
| | | superfamily protein | |
| LREU3632_02412 | pksH | Hypothetical protein | |
| LREU3632_02413 | pksl | Transcriptional regulator PadR-like family | May not be required |
| | | protein | Deleted from gene cluster |
| | | | for evaluation |
| LREU3632_02414 | baeC/pksJ | Polyketide biosynthesis malonyl | |
| | | CoA-acyl carrierprotein transacylase | |
| | | BaeC | |
| LREU3632_02415 | accB/pksK | Biotin carboxyl carrier protein of | |
| | | acetyl-CoA carboxylase | |
| LREU3632_02416 | cfiB/pksL | 2-oxoglutarate carboxylase small subunit | |
| LREU3632_02417 | accD 2/pksM | Acetyl-coenzyme A carboxylase carboxyl | |
| | | transferase | |
| | | subunit beta | |
| LREU3632_02261 | accA 2/pksN | Acetyl-coenzyme A carboxylase carboxyl | |
| | | transferase subunit alpha | |
| LREU3632_02262 | pksO | bifunctional biotin--[acetyl-CoA-carboxylase] | |
| | | synthetase/biotin operon repressor | |
| LREU3632_02265 | | bifunctional biotin--[acetyl-CoA-carboxylase] | Likely a regulator, |
| | | synthetase/biotin operon repressor | may not be |
| | | | required for |
| | | | producing the |
| | | | metabolite; |
| | | | appears to be |
| | | | located outside the |
| | | | BGC |

[0527] Note that LREU3632_02265 indicated in Table 22 may not be required.

[0528] The PKS gene cluster from LactoBacillus reuteri 3632 was engineered into Bacillus subtilis #105 to efficiently produce (secrete) AhR-activating metabolite. The BGC cluster was chromosomally integrated and confirmed by PCR and sequencing. The final strain did not contain any antibiotic markers.

[0529] In a first initial step (i) the pksI gene, transcriptional regulator, was deleted from the PKS gene cluster as it may not be required. Then (2) the rest of the gene cluster and pathway gened was cloned as a control. Using the cloned wild type AhR PKS BGC, three promoters—two PxylA promoters and a Physpank promoter were inserted to control gene expression as diagrammed in FIG. 5. The Physpank and pxl promoters were introduced as promoters for the emrY and fabF2 genes (these genes are coded in opposite directions on the gene cluster and the promoters are flanked and promote gene expression in opposite directions). A third promoter, pxlA was introduced in front of and upstream of the fabZ 3 genes. The cloned gene cassette construct was sequenced in its entirety to confirm all of the components and promoters. The cassette was then inserted into a suitable vector, in this instance designated as Bacillus BCG expression vector (FIG. 6). The cassette is flanked by left and right amylase gene amyE arms for homologous recombination and integration at the amylase gene amyE in the Bacillus subtilis strain. B subtilis strain 105 was transformed with the vector under conditions to promote homologous recombination and integration and then screened for full length insertion using PCR to verify the left, right and middle portions of the Ahr PKS BGC.

[0530] The PKS encoding BGC was successfully engineered into B. subtilis #105 and confirmed by PCR and sequencing (data not shown). Junctional PCR confirmed the correct and full integration of the PKS gene cluster in the B subtilis 105 genome (data not shown).

[0531] B. subtilis 105 is geneticall modified to integrate the PKS gene cassette in its bacterial genome. Extracts and supernatants of the modified strain are evaluated. These are evaluated in concert with native L. reuteri strain 3632, which expresses the Ahr activation product from its native PKS gene cassette. The AhR activation product is evaluated in an in vitro potency assessment against several AhR responsive cell lines such as HepG2-Lucia (human HepG2 hepatoma; Invivogen) and HT-29-Lucia (Human HT29 colon carcinoma; Invivogen).

[0532] The engineered strains are evaluated for AhR activity as follows. The strains are grown overnight in LB media. The cell pellet and the filter sterilized culture supernatant is evaluated for AhR activity using HepG2-Lucia^{m} AhR cells (Invivogen, hpgl-ahr). HepG2-Lucia^{m} AhR cells will be grown at 37° C., 5% CO₂ in MEM (Thermo Fisher, 616965-026), with 10% iFCS. For selection purposes, culture medium is supplemented with 100 μg/ml zeocin (Invivogen, ant-zn-5). FICZ (6-Formylindolo[3,2-b]carbazole; AhR Agonist and L-Kynurenine will be used as positive controls. Media control and B sub
[0533] 105 (ELA191105) parent strain controls are also included. The dilution of test material is performed at 2× of the intended final concentration in 40 ml complete growth medium and added with 40 μl of 2.2×105 cells/ml. Culture supernatants are harvested at different time points (over 48 h) and subjected to Luciferase Assay. For measuring luciferase activity in 384 well, white plate, 10 μl culture supernatant/well sample is added with 15 μl/well of Quanti-Luc/Coelenterazine-utilizing luciferase detection medium (Invivogen rep-qlc) in 50 ml ddH20 (instead 25 ml). The reaction is monitored at room temperature with BioTek plate Reader.

[0534] Efficacy of the Bsub integrated PKS cassette produced AhR metabolite evaluation in vivo is assessable using a mouse atopic dermatitits (AD) animal model (Martel B C et al (2017) Yale J Biol and Med 90:389-402). The AhR activator tapinarof is in clinical development for treatment of psoriasis and atopic dermatitits (AD) in humans (Bissonnette R et al (2021) J Am Acad Dermatol 84:1059-1067; Lebwohl M et al (2020) Skin J Cutane Med 4(6):s75). Tapinarof is a secondary metabolite from Photorhabdus luminescens.

[0535] The full sequence of the PKS cluster along with 5 kb flanking regions on both sides of the BGC, corresponding in total to 12,969 bp is provided below (SEQ ID NO: 110).

| | |
|---|---|
| 1 | gcaagaattt atcccatagt ttgcgagaaa tccttttaga agagcttgcc taataatagc |
| 61 | ggctcaatat aatttaaatt taaaaccacc taattagcaa tcgtaaaatt gttaattagg |
| 121 | tggttttagt atagaaataa cccctaaatt cagaatacta gaaaatctag tactattatt |
| 181 | ttttcctttt cgggaataat agacatgaaa gacaagaaaa gataagaaat ggtaaggaaa |
| 241 | ctttgtacag tttaataaaa gcagttgagt attgactatt ggcgtaagtt ttgatttttt |
| 301 | taattgtaat attaatagaa ttatttaatc tatgaaatac taatttcaca tttgcttttg |
| 361 | tatgtgaata aatctctttt tcttggatct tagagggttc gtaaggtaag gaattaattt |
| 421 | gtttagtata ttctttatcc gtagtttctt taattaattt cttcgaaaaa tgctttgatg |
| 481 | gtgttcgaga gtttgaattg ttgtttaagc ttttaataga gttatctctt attttatttt |
| 541 | tttgatattt aggaatattt aagttattga cctgctgatt gatgtaacta atagaattat |
| 601 | gctttgcggt atttaaattc ccatatagtc cagttagaaa tattgctaca gctaaggaaa |
| 661 | cccctacttg tcttaaaaca cctgcaacac tttgtgaagc ggttaagaga taaccttcaa |
| 721 | agtttgatgc tgctaaaact gttattggac ctgcaataat cccataccca gttcctaaaa |
| 781 | taatacaagt aaaaataatt aaggtaatat tatccatatc aatatgtgta aataaatagt |
| 841 | aagagatacc cattaataga aaaccagata agataatggc tcgagatcct aatttgtcta |
| 901 | agagaattgc agaaagtggt gacatgataa aaatcattcc tgtaataggc gtgataagaa |
| 961 | gtgcagcttc taattcggtt ctatgttgta tatgggtaaa atatgttggt aaaattactg |
| 1021 | taacagccac cagaaataaa ttacttaaaa ttatagaaac ggcagagccg gtaaattctc |
| 1081 | tattcttaaa taaaacaaga ggaatcattg gtgctttagc ataatgctca gtaattaaga |
| 1141 | atagtatgaa agttaaaatg aaaatgaaaa acagaaggtt gattgcagga cttttccacc |
| 1201 | cccagcttct tccttgagtc aatattagag ttaaagctga aagtaaaatt atacctaaaa |
| 1261 | gggaacctaa ataatcattt ccttcatttg actttggttc gtgaaagttg aaagtagata |
| 1321 | aacaaataac tagtgaaagt atagtaaaag gtatattaac gctaaatata gaatgccagc |
| 1381 | ccataaattg agttagaata cctccgattg aaggaccaag agcagcagct aaaccttgag |
| 1441 | tgattcctaa tgcggcaata actttttttc ttgtctttac tgtaacgata tttattccaa |
| 1501 | tagtcattga aagtggaaaa agaattgcgg ctcctaatga ttgaatgcca cggccaagaa |
| 1561 | ttaaaatagc taggttagga cttataccag aaatacttga tccaataaga aacataatta |
| 1621 | acccaattat atataagaaa ttcataccta atttttctgc aagtttagat agtgggatcg |
| 1681 | ttaaactagc aaaaagtata gtatatatgt ttaatgccca agacaaatta gttagagtga |
| 1741 | cgtgaagttc gttttgaata gctggcaatg caatattcat aacagttgta tctaacatac |
| 1801 | ataagaaaat actaatacac attgcaatta ttattagaaa tttgtttttt cttttggtca |
| 1861 | tacttgtttc ctcactttgt ttatattaac aatgttaata taaacaaaag aaaaataaat |
| 1921 | gtcaacaata ttatcattgt aaatatgaac aatatgtatt aatataaata aaaattagtg |
| 1981 | aggtgatttt atgacagctg taatagttgg aattggtatt actagttcct gtggagagtc |
| 2041 | ctttacagaa attgaacaaa atgtaggtaa aggaaaaaca ggtatttcta atatcgatta |
| 2101 | ttttgataca tctgagttaa catgtggaat tgctggtaac ttatcaaaga aaatatggaa |
| 2161 | agaggttttg caaattgctg ataaaaatga attagattgg agtagtagtc tttcaattta |
| 2221 | tactattcag cgattacttg aatcgtataa tatttcaaaa aaacaaagaa ttggtttatc |
| 2281 | tcttggaaca tgtaatgggg gaattcattc tttagcagaa tatcttgata cttcaaatga |
| 2341 | taaattttta aaaaattatc ctccgtacat tcagagtaaa gatatcgcac attatttcaa |
| 2401 | ctttaacggg ccaaagtatt cttttaattc agcttgtgcg gctagtgcta atgcaatagc |
| 2461 | ttatggagca gaaatgatta ataatagcga tgcagatctt gttgtgacgg gtggttgcga |
| 2521 | tccaatgtca gaatgggttt ttgctgggtt taattcatta agaaccttta atagtaaaaa |
| 2581 | ttgtatgcca tacggtgagg aatatggact taacctagga gaagctgcta catacttctt |
| 2641 | attagaagat aaagataagg caattaaaaa agggcatagg atatatgcgg aaattttagg |
| 2701 | gcacggctta tcaaatgatg cttatcatcc tacagcgcct gataaggatg gttcagggat |
| 2761 | atcctatgca ataaaaatgg ctttaaaaaa ctcgggtctg aagcctgaag atattttata |
| 2821 | tattaactct cacggaacag gaactaaagc caatgatagt gcagaataca gaggatttaa |
| 2881 | aactgttttt agaaatgaga tgccttttat tagctcaatg aaaggatacg taggccataa |
| 2941 | tctgggagca gctgctagta cagaattagc tataagttta atcggtatga atagtcagaa |
| 3001 | agttttgtat cctaacttta atttaaccaa gtatagagaa gattgtaacg atgagcatat |
| 3061 | cttaaaaaag ccttattcat tagatggata tgaagatatc aactttataa acaataatgc |
| 3121 | tgcgtttggt ggacaaaatg ttgctgtaat tttccatgtt aatttagaag gaaaatatgg |
| 3181 | tcatagtgaa aagaaactta aaacacagca acctatatat attaataatt ttggcgttgc |
| 3241 | aagtgataaa gcttatatga caaagcatgg tattggtatt cttgacgatt tacgcccctt |
| 3301 | aaagaaaaaa tatccaaaat tatataagcg acggatgaat atgttaactc aagtaagtat |
| 3361 | tatcgcggct aaacaaacat tgcaggatca gtatagtaat tgtgggcttg tgtatggtac |
| 3421 | gccttttggt agtctttcat caacactaaa atatgttgat tctattcaaa aatatgggtt |
| 3481 | taaaaatgct agtggggcat attttccaga tttagttatt aattcaacga cggggcatat |
| 3541 | ttgtcaagcg ctttcattga agagttatag ttcatctata agttcaggag gtgatgaaga |
| 3601 | cttaagagcc ttaattattg cacataatgc gcttaataaa gggtacgctt caactatgtt |
| 3661 | agttggagca ggccaagaag agacagaact gggcaataaa gtgttgaagc gtgaagttaa |
| 3721 | taatcatgca acatttttaa gccttagtaa caaaaaaatg caagaaacaa tagcagaggt |
| 3781 | tctatcttcc ggtgcaatgg gatttaaaaa taaaaaagag cttttgacca ttatacgatc |
| 3841 | gaaaatagat gagaagttgg ctaatgatgc agatctaaaa gtgataattc aaaataatag |
| 3901 | tgaaattacg aacgacgaat taataagtta tttcaagaat gataacaata tcagtataaa |
| 3961 | ttctgataat tttgcggata gtaattttaa atcatttgtt aatcatagaa atgaaaatag |
| 4021 | gttgttgctt gttggaattt cacaagtcaa tgatgtttcg tttgcagata ttaaaaaaat |
| 4081 | aaaatagaga aagaggtaat actgatgaag catagtattg aagaaattaa ggatatttta |
| 4141 | aaagaaaaag tattaattga acgattagag ttagatgatg tagaacccaa tgatatttca |
| 4201 | gataatgaaa atttatttga tgaagaagga ctagcgttag attccgtgga agcattagat |
| 4261 | atcatgacag gaattagtga agaatttggc attgacacat caatgttagg gcaggaagat |
| 4321 | ataaaccatt ttcaaagcgt taatgatatg gctaaatata tctcagagaa tgaatagagg |
| 4381 | atagttatga aatcagtact tatcacggga ataactggag gaataggaag aaaattaact |
| 4441 | gaagcttatt cttcaaaggg atatcatatt tatggtacgt gtagtagaaa ttcagactct |
| 4501 | ttacaacaat ttaaagagaa atggcctagt gttgaaataa ttcaaataaa tcatgatgac |
| 4561 | ttgatagatg taagtacaga atattccttt ttttttagaa aagtgcaacc agatattgtt |
| 4621 | attaacaatg ctggaatagt gaaagataat tttttagttc aaatgtcagt gaatgatttt |
| 4681 | caagaagtgt tgactactaa tttgatttcg gcttgggtaa tagtcaaaga aatgctttta |
| 4741 | catttaaatg ataataaaat tcataaaatc attaatgtag cttcaatatc tggaattata |
| 4801 | gggcgtgaag gacagtgtaa ctatgcagca actaagggag gattagtagg cttatgtcaa |
| 4861 | ttgatagaac atttagctcc gaaaggcagt aatgttattt cattttcagt tgcaccagga |
| 4921 | ttaattgata cagatataaa gggaaaaatg ccaaagaaaa aaatcgataa tttaaagaag |
| 4981 | gccacattgg caaataggct aggaacacca gaggaagtat caaaatttat ttttaaacta |
| 5041 | tctgaagagg atatttcgta tagtgatgga actttatata ggattgatgg tggagtttta |
| 5101 | aaatgaagat aataaataat acgattcaag taaccgactt gcttcaatca tatggaaaag |
| 5161 | atgaaaaaga catagtaata attggtccca gcccatttaa tgaattagat tgccttaaag |
| 5221 | aaacaaaaat aatcgataaa gttcagctta atttagagga agttttttca tttgtaaaaa |
| 5281 | ataatagcgt tgctttaatg aaaaaaagaa gaggaaccat tgccttttta ttaaatccac |
| 5341 | aaagttttga gggaggcaat aatatctatt ctccaatcta taattcagca attaagagct |
| 5401 | ttttgaaatc cttatcgaag gaaatgaatc cattcagagt taaagttatg gggataatct |
| 5461 | tacctttaac acaagataca aaatcgactc ggaaatatga tttagttaca ttaaagtaca |
| 5521 | aaggaattaa taatgaaaag caggtacaag atattctaag cttacttaag ctttcagaaa |
| 5581 | tactaaacgg acaaattgtc tcgctaggcg ctgaattgaa tctttagtaa aggagaggga |
| 5641 | aatcatttta tttctagatc aaaatgcagt tataaaaatg ttgccgcaga aggagccatt |
| 5701 | caggttctta gatacggttg aatgctttga tagagaaaaa cgtatgatta ctgcattgca |
| 5761 | acaatttggt aatgaggaat tcttctttaa gggtcatttt ccaaataatc caatagttcc |
| 5821 | aggggtactt ctaacagaat cgattgctca agcaggtttg atattgattt ctttattaga |
| 5881 | aggccaaaaa gtgaaaattg gatatctagc ccaaattgaa aagacaaaat ttttcaaaga |
| 5941 | ggtctatccc gacgagcaag taaaggttaa atgttcatta aagaaaaaaa taggtaaata |
| 6001 | ctattacatt gcaggagaag tctactcgca gcaattaaat aaaagatgta tgagagcaac |
| 6061 | agtaatagta tgtatttgat atggtgatgg ttcatgataa aaattactga aaatatagtt |
| 6121 | caaataaaac taaagcaagg caaaaattat ccagacgtta atgtttatgt acttctaaaa |
| 6181 | gaaaaagtgt taattgatat aggccccaaa tcaattaata cacttaacct tttaaaaaaa |
| 6241 | gaattagcta ggttaggatt aagttttgaa acacttaatt taattattct aactcaccat |
| 6301 | catgttgacc atgtaggact tttagagtac cttccctctg ggttacgtat cgttggacct |
| 6361 | gatcatttag acttttatag ttcagatatt tataaaaaaa gtattcaaaa attgttagtt |
| 6421 | gacgataatc tctctattga atttaaaaat gatatagaaa aacaacttac tactgaaata |
| 6481 | attccaagta ttaatagaga aaactacgtt ccttttagtg agtcaaagaa aattttgcaa |
| 6541 | caatttggtc ttacagctgt agagctatca ggtcattcta gtgaagatat tgtaattact |
| 6601 | gattcagaaa ataactgttt tactggtgat attattattc ctaaaatttt ttttaactgt |
| 6661 | atatatgagg ttgataaagt aaggcccaaa catcaacgtt ggtcatatta tcatgagctt |
| 6721 | aattttttag acaggttagt aaacctagta ttgccaggac atggagatat tctaaagtta |
| 6781 | gaagaattaa aaaaggcagt tttggttaat agaaaaagaa tgagacggac agagaaaaaa |
| 6841 | ataataagag agttaaataa agaaacagtt aatggagtgg agaatgtttg tcgaagtgta |
| 6901 | ttccaaagtt ttttgcctta tagcaaattc ttaccgtttt cagaagtagt tagtgttatc |
| 6961 | gagagtaatg atgagagaat taactattga tattatttat ataaatacac taaataataa |
| 7021 | cagctttgca agtttagatt ctagaaaaag aatcaaaaag ttacagcatc agctaggaca |
| 7081 | atatatgctt tctcaaatat cttataaaaa aggttattca atttcccata gtcatatgtg |
| 7141 | tgtagcctta gcaagttatg ttaatagggt tggtattgat attgaactta taaataaaac |
| 7201 | aaagaaggca aggatacagt tcctttcgaa aagcgaaaaa caattagtaa atagatatgg |
| 7261 | ttttacaaga atatggacac taaaggaagc tatagctaag tatcataccg ttgggttacc |
| 7321 | tcggcttaat acagttgaga ttaaagaaat aaatgcttcg aacgttatct attttgttaa |
| 7381 | taaagcacca agaaaattgc agtataaatt tttagatata atcccttctt ataggttgag |
| 7441 | tgtagtggca aaaaaggtat caagtttttg cattagaatc acacaagaag aagatttgaa |
| 7501 | ggggctaata aggagaatgt aattaatgca aggaagagac ataattctag gaatacttga |
| 7561 | acgaaataat agaacaggat atgaaattaa tgatattttg aaaaatcaat tatcttattt |
| 7621 | ctatgacgga acatatggaa tgatatatcc aacattacga aagcttgaaa aggaaggaaa |
| 7681 | aataaaaaag gaaaaaattg tgcaaaatga taagccaaat aagaatgttt attctattac |
| 7741 | agatacggga atagaagaat ttaaagaata cttggattct tctattcaag atgatattta |
| 7801 | taaatcggac tttttaatgc gtctcttttt tggaaactca ttaccaaatc aagaaattat |
| 7861 | tagagctatt aaacaagaga tacaacgtaa aaatgaaaag atagatcaat taactgtaaa |
| 7921 | ttataaaaaa tggaaaaaaa atggaatgag taaaacacaa gaaataaccg tcaaatatgg |
| 7981 | tattgcgcag tataccgcaa ttgttcagat gctgacaaaa gagcttgata cgttacgaag |
| 8041 | aaatgagatg gatgattaat gtcattagga attatattta gtgggcaagg agcacaaaaa |
| 8101 | tctaaaatgg gtcttgattt ttatgaagat ccactatttg ctgaattact taaccacgca |
| 8161 | agtaatatat ctggtctaaa catgttaaaa atcttggaaa acaaaaataa tgagcttaca |
| 8221 | gagactgtta atttacaacc aacattaaca acattgaatt atggcatata tcgaatgctg |
| 8281 | aaaagggata tttttgatat gaaagtaagc tgtatggcag ggctttcttt aggagaatat |
| 8341 | tctgcactga ttgcttctaa tgctttaact tttgaacagg gaatacaatt actagtagac |
| 8401 | cgcggaaaat atatgcagga agcttcgaat agtaatgcag gaaaaatgtt agcacttata |
| 8461 | aaacctaaac taaaagagat aactcaaatt tgtgctttgt gtaaggttga aattgctaat |
| 8521 | tataattctc caaagcagat agtaataggc ggacaaaatt tgcaaattga atttgcaaag |
| 8581 | aaaatgatta tggagcgtaa agctgcatta agaataattg agttagaagt aagtggcgcc |
| 8641 | tttcatactt cgttattttc aaatgttcaa aaacaattgg aaaagcgatt aaaagatgtt |
| 8701 | aaatttgaga atccacaaat tccggtagtt agtaatacta cagttgagga atttcaaaag |
| 8761 | gaaagtctta cagccgtatt atcaaaacaa gttgctaatc ctacatattt tgaaaaagat |
| 8821 | attaagttaa tgaaaaatac ttatggattg acacatatag ttcaaattgg tcctggtaag |
| 8881 | gcattaagta attttgtgaa gcaaatgtca ttaggaatta agacatataa tatttctaat |
| 8941 | ataaaagact atagaaaatt tctgaatagt tatagagata ttaatttgaa aggaaagaaa |
| 9001 | aatggatttt gagaaaattc agcaactaat tcaaatgttt gaaagctcta atacaagaga |
| 9061 | actaaaaata gatgataata actttcacat ttatcttaca aaaaacgtaa gtaaagaacc |
| 9121 | aattcacgat ataaaatttg aatcgaataa aattcagcaa gcctcagagg caaaagcaaa |
| 9181 | caggaaaacg ataacagccc cattggttgg aacagtttat ttagcctctt ctcctacgtc |
| 9241 | taaaccgtat gttcaagtag ggagccatat tgataaagga gatacagtgt gtgtaataga |
| 9301 | ggctatgaag ctaatgacgg aaataaaaag tgaggttacc ggaacaattg aaaaagttaa |
| 9361 | tgtagagaat ggagaattag ttgaagttgg gcaaccgtta ttttcagttt ctggagaaaa |
| 9421 | agaaagttaa tgaaagagtg aggtgtagtg atgttttcta aagtactagt tgctaatcgt |
| 9481 | ggagaaatag ctgttcgtat tattagaact cttcatgaat tgggcattaa agcggtagct |
| 9541 | atttattcga ttgttgatca agaaagtctt catgttcaat tggctgatga agcagtttgt |
| 9601 | gtaggtggag cacgaccaca ggattcgtat ttaaatacta ctaatatttt aacagcagca |
| 9661 | attggaacag gagcacaagc gatacaccct ggctttggat tcctttcaga aaacgctgag |
| 9721 | tttgcaagaa tgtgtgaaaa atgcggaata gtatttatag gtccgcgtgc tgctacgatt |
| 9781 | gatttaatgg gaaataaaga aaatgcgcgc gagactatgc aaaagagagg gatacctgtt |
| 9841 | attcctggaa gtagttccta cataacaaac agttatgatg caaaaagagt tgcagataaa |
| 9901 | ataggatatc ctattttaat aaaggcggca gctgggggtg gaggtaaagg tattagaaga |
| 9961 | gttgtaacgc ctgagcaaat gaaacaagaa tttaataatg cgcaaagaga agctcgtata |
| 10021 | tcatttggtg atgatcgtat gtaccttgaa aaaataatgt gcaatgttaa acatattgaa |
| 10081 | gtacaggtag ttcgtgatag attcggaaat agtgtctatt ttccagaacg cgattgttca |
| 10141 | ctccaacggg ataagcaaaa aattatagaa gagagtccat gctcggttat caattcagaa |
| 10201 | caaagaaaaa ttttaggaag gtatgctatt aaagcaattg aagcagttga ttatcttaat |
| 10261 | acaggaacta ttgaattttt gatggataaa aataataaat tttattttat ggaaatgaat |
| 10321 | actcgtattc aagttgaaca tactgtaact gagatggtaa cgggaataga tctagtaaag |
| 10381 | gtacaactga tgatcgcttc aggtgaggaa cttccttttt cacaaaataa tattaagtta |
| 10441 | aatggggtag ctattgagtg tagaattaat gcagaagatc ctaaaaataa ctttgttcct |
| 10501 | tcaactggaa aaataaatta tttatattta cctgtaggta acttgggtat gagaattgat |
| 10561 | actgcacttt actctggaga aaagataaca ccattttatg attcaatgat tgcaaaagta |
| 10621 | atctcgcatg gccatactcg cgtagaagcg atcaatagaa tgaagaggtt aatgcaagaa |
| 10681 | ctggttataa aaggtgttaa aacaaataaa gatcttcact tatcaatttt gggagattca |
| 10741 | agttttttga aagatacagt aacaactgag tatttagaga aaaacttttt accaatctgg |
| 10801 | aaagagaggg agaaaaatgc agctgtatga aagtgcaacg ttaactaagc aacatgtaaa |
| 10861 | ggcgaatatt aaagcaaatc aaaaagtacc tgatgggatg ttaaaaaaat gtcctaagtg |
| 10921 | tgggaaaatc tttctgtcta cagaatttga taagtatttt tcgtgtcctg gttgtaatta |
| 10981 | tggatttagg attggttcat ggcaaagggt agcctgggcg gttgatgaat tttatgaaga |
| 11041 | ggatggttca cgagaactaa taacctcaga tcctttacat tttcctaatt atgtaaaaaa |
| 11101 | gattcaagga cttcaaaaga ctactaaggt aaatgaagca gttttaacgg gtaaagctaa |
| 11161 | aataaaagac caaatttttg agtgtggcat tatggatcct cactttataa tgggatcatt |
| 11221 | aggaacaatt actggcgaaa agattacgag attatttgaa cgtgctacaa aggagaggtt |
| 11281 | gcctgttgtc ctatggactg cttcaggggg agctagaatg caagaaggaa ttatgtcatt |
| 11341 | aatgcagatg gcaaaaataa gtcaagctat agcacaacat gcatcgaaag gacttttata |
| 11401 | cattgttatt ttaactgatc caacaacagg tggagtaaca gcaagttttg caatgcaagg |
| 11461 | agacattatt ttagcagagc cacatacttt agtaggattt gcagggcggc gagttattga |
| 11521 | gcaaactatt catgagagaa tcccagatac gttacaggat gcggagaatg taataaaaca |
| 11581 | tggattcata gatttaatag tatctcggag tgaagaaaaa tctttacttt ataaattgtt |
| 11641 | aaaatatggt aggtgataat aatggcaact gagaatgcaa tggcaattgt aaaagctgct |
| 11701 | cgaagtgata ataaaataac tgctaaagaa attatagaag aagtattttc agattttatt |
| 11761 | gaattccatg gtgatcgtaa aggaacagat gattcagcaa ttcttggagg attggcaata |
| 11821 | ctttcatcta caccagtaac agtaattgcg actaataggg gggaaacagt tggtgaacat |
| 11881 | ttgagtacac attttgggtg tccaactcca ggtggctatc gtaaagcttt gcgtttagca |
| 11941 | aagcaggctg caaagtttaa tagaccaatt atatttttag taaatactcc tggagcttat |
| 12001 | ccagggaaaa cagctgaaga acaagggcaa ggatctgcga ttgcgcaaaa tattatccaa |
| 12061 | ataagtcaac ttccagttcc aattattact attatttatg gtgaaggtgg cagtggaggt |
| 12121 | gcattagcat tggcttgcgg tgatcaggtg tggatgctag agaatagtac atattcaatt |
| 12181 | ttatcacctg agggttttgc ctctatttta tggaaagatg gatcacgtac agaagaagcc |
| 12241 | gcagaattaa tgcaaatgac cccaaaagcc ttgctaagac ataaggttat tgaaggaata |
| 12301 | attccagaaa gtaaagatca caaagtaaca tgtcgagcaa ttgctaatat tttagataaa |
| 12361 | cagttacaag aattaggaaa actttcagcg gtagatttat tgattcaacg aaaagaaaga |
| 12421 | tatagaaaat tttagttagt atagtaagag gagagaatac attacggtgc acgacttatt |
| 12481 | atcgcttaat agaattaaag aattatataa agagaaagca atgacaaatt gcaacttttt |
| 12541 | ttactttaat aaagtagatt ctactcaaaa aatagcaaaa tattttttag accatttaaa |
| 12601 | tatcaataaa ccatgtacta tttttgctgg aagtcaaacg agaggctatg gtaaaagaaa |
| 12661 | taggctattt tattcaccac aaaattcggg gatttatatg agtataatta ttccacaata |
| 12721 | cgaaatgcaa aatgaggata ttggtttatt aacaatttca ttagggagtg gaatactaga |
| 12781 | agttttaaag aagtattatc ctaaaaaaat tttttattta aaatgggtaa atgatattct |
| 12841 | attaggcaag gtgaactact cggccataaa tgaccgagct tctgggaaca cgaagtagta |
| 12901 | tttaggatat tacacaagta ttcttgctac ctaacttaca gaactccgtt cttttaccaa |
| 12961 | ggctagttc |

[0536] The amino acid sequences for the PKS gene cluster proteins noted in Table 22 and encoded by the gene cluster are provided below. Annotations providing their locations in the 12,969 bp cluster sequence referenced above and corresponding to genome map locations are also indicated.

LOCUS PKS_encoding_region 12969 bp DNA

| | |
|---|---|
| DEFINITION | Lactobacillus reuteri strain 3632. |
| SOURCE | Lactobacillus reuteri |
| ORGANISM | Lactobacillus reuteri |
| FEATURES | Location/Qualifiers |
| source | join (11662..>12969,<1..11661) |
| | /organism = ″Lactobacillus reuteri″ |
| | /mol_type = ″genomic DNA″ |
| | /strain = 3632 |
| CDS | complement (176..1861) |
| | /gene = ″emrY″ |
| | /locus_tag = ″LREU3632_02405″ |
| | /inference = ″ab initio prediction: Prodigal: 2.6″ |
| | /inference = ″similar to AA sequence: UniProtKB: P52600″ |
| | /product = ″putative multidrug resistance protein EmrY″ |

/translation = ″MTKRKNKFLIIIAMCISIFLCMLDTTVMNIALPAIQNELHVTLT
NLSWALNIYTILFASLTIPLSKLAEKLGMNFLYIIGLIMFLIGSSISGISPNLAILIL
GRGIQSLGAAILFPLSMTIGINIVTVKTRKKVIAALGITQGLAAALGPSIGGILTQFM
GWHSIFSVNIPFTILSLVICLSTFNFHEPKSNEGNDYLGSLLGIILLSALTLILTQGR
SWGWKSPAINLLFFIFILTFILFLITEHYAKAPMIPLVLFKNREFTGSAVSIILSNLF
LVAVTVILPTYFTHIQHRTELEAALLITPITGMIFIMSPLSAILLDKLGSRAIILSGF
LLMGISYYLFTHIDMDNITLIIFTCIILGTGYGIIAGPITVLAASNFEGYLLTASQSV
AGVLRQVGVSLAVAIFLTGLYGNLNTAKHNSISYINQQVNNLNIPKYQKNKIRDNSIK
SLNNNSNSRTPSKHFSKKLIKETTDKEYTKQINSLPYEPSKIQEKEIYSHTKANVKLV
FHRLNNSINITIKKIKTYANSQYSTAFIKLYKVSLPFLIFSCLSCLLFPKRKK″ (SEQ ID NO: 7)
/label = ″emrY CDS″
CDS 1991..4087

/gene = ″fabF_2″
/locus_tag = ″LREU3632_02406″
/EC_number = ″2.3.1.179″
/inference = ″ab initio prediction:Prodigal: 2.6″
/inference = ″similar to AA sequence: UniProtKB: Q9KQH9″
/product = ″3-oxoacyl-[acyl-carrier-protein] synthase 2″

/translation=″MTAVIVGIGITSSCGESFTEIEQNVGKGKTGISNIDYFDTSELT
CGIAGNLSKKIWKEVLQIADKNELDWSSSLSIYTIQRLLESYNISKKQRIGLSLGTCN
GGIHSLAEYLDTSNDKFLKNYPPYIQSKDIAHYFNFNGPKYSFNSACAASANAIAYGA
EMINNSDADLVVTGGCDPMSEWVFAGFNSLRTFNSKNCMPYGEEYGLNLGEAATYFLL
EDKDKAIKKGHRIYAEILGHGLSNDAYHPTAPDKDGSGISYAIKMALKNSGLKPEDIL
YINSHGTGTKANDSAEYRGFKTVFRNEMPFISSMKGYVGHNLGAAASTELAISLIGMN
SQKVLYPNFNLTKYREDCNDEHILKKPYSLDGYEDINFINNNAAFGGQNVAVIFHVNL
EGKYGHSEKKLKTQQPIYINNFGVASDKAYMTKHGIGILDDLRPLKKKYPKLYKRRMN
MLTQVSIIAAKQTLQDQYSNCGLVYGTPFGSLSSTLKYVDSIQKYGFKNASGAYFPDL
VINSTTGHICQALSLKSYSSSISSGGDEDLRALIIAHNALNKGYASTMLVGAGQEETE
LGNKVLKREVNNHATFLSLSNKKMQETIAEVLSSGAMGFKNKKELLTIIRSKIDEKLA
NDADLKVIIQNNSEITNDELISYFKNDNNISINSDNFADSNFKSFVNHRNENRLLLVG
ISQVNDVSFADIKKIK″ (SEQ ID NO: 8)
/label = ″fabF 2 CDS″
CDS 4105..4377

/locus_tag = ″LREU3632_02407″
/inference = ″ab initio prediction: Prodigal: 2.6″
/inference = ″protein motif: CLUSTERS: PRK09184″
/product = ″acyl carrier protein″

/translation = ″MKHSIEEIKDILKEKVLIERLELDDVEPNDISDNENLFDEEGLA
LDSVEALDIMTGISEEFGIDTSMLGQEDINHFQSVNDMAKYISENE″ (SEQ ID NO: 9)
/label=″acyl carrier protein CDS″
CDS 4387..5106

/gene = ″fabG_2″
/locus_tag = ″LREU3632_02408″
/EC_number = ″1.1.1.100″
/inference = ″ab initio prediction: Prodigal: 2.6″
/inference = ″similar to AA sequence: UniProtKB: 067610″
/product = ″3-oxoacyl-[acyl-carrier-protein] reductase FabG″

/translation = ″MKSVLITGITGGIGRKLTEAYSSKGYHIYGTCSRNSDSLQQFKE
KWPSVEIIQINHDDLIDVSTEYSFFFRKVQPDIVINNAGIVKDNFLVQMSVNDFQEVL
TTNLISAWVIVKEMLLHLNDNKIHKIINVASISGIIGREGQCNYAATKGGLVGLCQLI
EHLAPKGSNVISFSVAPGLIDTDIKGKMPKKKIDNLKKATLANRLGTPEEVSKFIFKL
SEEDISYSDGTLYRIDGGVLK″ (SEQ ID NO: 10)
/label = ″fabG 2 CDS″
CDS 5103..5627

/locus_tag = ″LREU3632_02409″
/inference = ″ab initio prediction: Prodigal: 2.6″
/product = ″hypothetical protein″

/translation = ″MKIINNTIQVTDLLQSYGKDEKDIVIIGPSPFNELDCLKETKII
DKVQLNLEEVFSFVKNNSVALMKKRRGTIAFLLNPQSFEGGNNIYSPIYNSAIKSFLK
SLSKEMNPFRVKVMGIILPLTQDTKSTRKYDLVTLKYKGINNEKQVQDILSLLKLSEI
LNGQIVSLGAELNL″ (SEQ ID NO: 11)
/label = ″hypothetical protein CDS″
CDS 5744..6079

/gene = ″fabZ_3″
/locus_tag = ″LREU3632_02410″
/EC_number = ″4.2.1.59″
/inference = ″ab initio prediction: Prodigal: 2.6″
/inference = ″similar to AA sequence: UniProtKB: P64107″
/product = ″3-hydroxyacyl-[acyl-carrier-protein] dehydrataseFabZ″

/translation = ″MITALQQFGNEEFFFKGHFPNNPIVPGVLLTESIAQAGLILISL
LEGQKVKIGYLAQIEKTKFFKEVYPDEQVKVKCSLKKKIGKYYYIAGEVYSQQLNKRC
MRATVIVCI″ (SEQ ID NO: 12)
/label = ″fabZ 3 CDS″
CDS 6094..6990

/locus_tag = ″LREU3632_02411″
/inference = ″ab initio prediction: Prodigal: 2.6″
/inference = ″protein motif: Pfam: PF00753.21″
/product = ″Metallo-beta-lactamase superfamily protein″

/translation=″MIKITENIVQIKLKQGKNYPDVNVYVLLKEKVLIDIGPKSINTL
NLLKKELARLGLSFETLNLIILTHHHVDHVGLLEYLPSGLRIVGPDHLDFYSSDIYKK
SIQKLLVDDNLSIEFKNDIEKQLTTEIIPSINRENYVPFSESKKILQQFGLTAVELSG
HSSEDIVITDSENNCFTGDIIIPKIFFNCIYEVDKVRPKHQRWSYYHELNFLDRLVNL
VLPGHGDILKLEELKKAVLVNRKRMRRTEKKIIRELNKETVNGVENVCRSVFQSFLPY
SKFLPFSEVVSVIESNDERINY″ (SEQ ID NO: 13)
/label = ″Metallo-beta-lactamase superfamily protein CDS″
CDS 6971..7522

/locus_tag = ″LREU3632_02412″
/inference = ″ab initio prediction: Prodigal:2.6″
/product = ″hypothetical protein″

/translation=″MRELTIDIIYINTLNNNSFASLDSRKRIKKLQHQLGQYMLSQIS
YKKGYSISHSHMCVALASYVNRVGIDIELINKTKKARIQFLSKSEKQLVNRYGFTRIW
TLKEAIAKYHTVGLPRLNTVEIKEINASNVIYFVNKAPRKLQYKFLDIIPSYRLSVVA
KKVSSFCIRITQEEDLKGLIRRM″ (SEQ ID NO: 14)
/label = ″hypothetical protein CDS″
CDS 7526..8059

/locus_tag = ″LREU3632_02413″
/inference = ″ab initio prediction: Prodigal: 2.6″
/inference = ″protein motif: Pfam: PF03551.8″
/product = ″Transcriptional regulator PadR-like family protein″

/translation = ″MQGRDIILGILERNNRTGYEINDILKNQLSYFYDGTYGMIYPTL
RKLEKEGKIKKEKIVQNDKPNKNVYSITDTGIEEFKEYLDSSIQDDIYKSDFLMRLFF
GNSLPNQEIIRAIKQEIQRKNEKIDQLTVNYKKWKKNGMSKTQEITVKYGIAQYTAIV
QMLTKELDTLRRNEMDD″ (SEQ ID NO: 15)
/label = ″Transcriptional regulator PadR-like family protein
CDS 8059..9012

/gene = ″baeC″
/locus_tag = ″LREU3632_02414″
/EC_number = ″2.3.1.39″
/inference = ″ab initio prediction: Prodigal: 2.6″
/inference= ″similar to AA sequence: UniProtKB: A7Z4X8″
/product=″Polyketide biosynthesis malonyl CoA-acyl carrier
protein transacylase BaeC″

/translation = ″MSLGIIFSGQGAQKSKMGLDFYEDPLFAELLNHASNISGLNMLK
ILENKNNELTETVNLQPTLTTLNYGIYRMLKRDIFDMKVSCMAGLSLGEYSALIASNA
LTFEQGIQLLVDRGKYMQEASNSNAGKMLALIKPKLKEITQICALCKVEIANYNSPKQ
IVIGGQNLQIEFAKKMIMERKAALRIIELEVSGAFHTSLFSNVQKQLEKRLKDVKFEN
PQIPVVSNTTVEEFQKESLTAVLSKQVANPTYFEKDIKLMKNTYGLTHIVQIGPGKAL
SNFVKQMSLGIKTYNISNIKDYRKFLNSYRDINLKGKKNGF″ (SEQ ID NO: 16)
/label = ″baeC CDS″
CDS 9002..9430

/gene = ″accB_2″
/locus_tag = ″LREU3632_02415″
/inference = ″ab initio prediction: Prodigal:2.6″
/inference = ″similar to AA sequence: UniProtKB: P0ABD8″
/product=″Biotin carboxyl carrier protein of acetyl-CoA″
carboxylase

/translation = ″MDFEKIQQLIQMFESSNTRELKIDDNNFHIYLTKNVSKEPIHDI
KFESNKIQQASEAKANRKTITAPLVGTVYLASSPTSKPYVQVGSHIDKGDTVCVIEAM
KLMTEIKSEVTGTIEKVNVENGELVEVGQPLFSVSGEKES″ (SEQ ID NO: 17)
/label = ″accB 2 CDS″
CDS 9451..10830

/gene = ″cfiB_2″
/locus_tag = ″LREU3632_02416″
/EC_number = ″6.4.1.7″
/inference = ″ab initio prediction: Prodigal:2.6″
/inference = ″similar to AA sequence: UniProtKB: D3DJ42″
/product = ″2-oxoglutarate carboxylase small subunit″

/translation = ″MFSKVLVANRGEIAVRIIRTLHELGIKAVAIYSIVDQESLHVQL
ADEAVCVGGARPQDSYLNTTNILTAAIGTGAQAIHPGFGFLSENAEFARMCEKCGIVF
IGPRAATIDLMGNKENARETMQKRGIPVIPGSSSYITNSYDAKRVADKIGYPILIKAA
AGGGGKGIRRVVTPEQMKQEFNNAQREARISFGDDRMYLEKIMCNVKHIEVQVVRDRF
GNSVYFPERDCSLQRDKQKIIEESPCSVINSEQRKILGRYAIKAIEAVDYLNTGTIEF
LMDKNNKFYFMEMNTRIQVEHTVTEMVTGIDLVKVQLMIASGEELPFSQNNIKLNGVA
IECRINAEDPKNNFVPSTGKINYLYLPVGNLGMRIDTALYSGEKITPFYDSMIAKVIS
HGHTRVEAINRMKRLMQELVIKGVKTNKDLHLSILGDSSFLKDTVTTEYLEKNFLPIW
KEREKNAAV″ (SEQ ID NO: 18)
/label = ″cfiB 2 CDS″
CDS 10817..11656

/gene = ″accD_2″
/locus_tag = ″LREU3632_02417″
/EC_number = ″6.4.1.2″
/inference = ″ab initio prediction: Prodigal: 2.6″
/inference = ″similar to AA sequence: UniProtKB: P0CC08″
/product=″Acetyl-coenzyme A carboxylase carboxyl transferase subunit beta″

/translation = ″MQLYESATLTKQHVKANIKANQKVPDGMLKKCPKCGKIFLSTEF
DKYFSCPGCNYGFRIGSWQRVAWAVDEFYEEDGSRELITSDPLHFPNYVKKIQGLQKT
TKVNEAVLTGKAKIKDQIFECGIMDPHFIMGSLGTITGEKITRLFERATKERLPVVLW
TASGGARMQEGIMSLMQMAKISQAIAQHASKGLLYIVILTDPTTGGVTASFAMQGDII
LAEPHTLVGFAGRRVIEQTIHERIPDTLQDAENVIKHGFIDLIVSRSEEKSLLYKLLK
YGR″ (SEQ ID NO: 19)
/label = ″accD 2 CDS″
CDS 11680..12435

/gene = ″accA_2″
/locus_tag = ″LREU3632_02261″
/EC_number = ″6.4.1.2″
/inference = ″ab initio prediction: Prodigal: 2.6″
/inference = ″similar to AA sequence: UniProtKB: Q9FBB7″
/product = ″Acetyl-coenzyme A carboxylase carboxyl transferase subunit
alpha″

/translation = ″MAIVKAARSDNKITAKEIIEEVFSDFIEFHGDRKGTDDSAILGG
LAILSSTPVTVIATNRGETVGEHLSTHFGCPTPGGYRKALRLAKQAAKFNRPIIFLVN
TPGAYPGKTAEEQGQGSAIAQNIIQISQLPVPIITIIYGEGGSGGALALACGDQVWML
ENSTYSILSPEGFASILWKDGSRTEEAAELMQMTPKALLRHKVIEGIIPESKDHKVTC
RAIANILDKQLQELGKLSAVDLLIQRKERYRKF″ (SEQ ID NO: 20)
/label = ″accA 2 CDS″
CDS 12467..12898

/locus_tag = ″LREU3632_02262″
/inference = ″ab initio prediction: Prodigal: 2.6″
/inference = ″protein motif: CLUSTERS: PRK11886″
/product = ″bifunctional biotin- [acetyl-CoA-carboxylase] synthetase/biotin
operon repressor″

/translation = ″MHDLLSLNRIKELYKEKAMTNCNFFYFNKVDSTQKIAKYFLDHL
NINKPCTIFAGSQTRGYGKRNRLFYSPQNSGIYMSIIIPQYEMQNEDIGLLTISLGSG
ILEVLKKYYPKKIFYLKWVNDILLGKVNYSAINDRASGNTK″ (SEQ ID NO: 21)
/label = ″bifunctional biotin--[acetyl-CoA-carboxylase]
synthetase/biotin operon repressor CDS″

B. Engineering of Mersacidin Biosynthetic Cluster from LactobaciRus Reuteri into Bacillus Subdlis

[0537] The lanthipeptide mersacidin is a ribosomally synthesized and post-translationally modified peptide (RiPP) produced by LactoBacillus reuteri and Bacillus amyloliquefaciens. It has antimicrobial activity against a range of Gram-positive and Gram-negative bacteria, including methicillin resistant Staphylococcus aureus, giving it potential therapeutic relevance. The structure and bioactivity of mersacidin are derived from a unique combination of lanthionine ring structures, which makes mersacidin also interesting from a lantibiotic-engineering point of view. Lantibiotics are a class of polycyclic peptide antibiotics that contain the characteristic thioether amino acids lanthionine or methyllanthionine. as well as the unsaturated amino acids dehydroalanine. and 2-aminoisobutyric acid. They belong to ribosomally synthesized and post-translationally modified peptides. These peptides primarily act by disrupting the membrane integrity of target organisms. The production of active lantibiotics in bacteria is typically mediated via a gene cluster. Production of a lantibiotic by bacteria requires a series of steps, including formation of the prelantibiotic, dehydration and cross-linkage reactions, cleavage of the leader, and secretion, with proteins/enzymes/transporters involved in these necessary steps encoded and/or regulated via the gene cluster.

[0538] The Bacillus subtilis strain 105 is modified to introduce the mersacidin cluster from LactoBacillus reuteri so as to efficiently produce mersacidin. In a particular aspect, Bacillus subtilis strain 105 is modified to introduce the mersacidin cluster from LactoBacillus reuteri so as to efficiently secrete mersacidin. In particular, the LactoBacillus reuteri strain 3632 (ATCC PTA-126788) contains a BGC that encodes for a full suite of proteins required for mersacidin production. LactoBacillus reuteri strain 3632 is detailed and described, including its full genome nucleic acid sequence in Kumar et al, WO 2020/163398A1, published Aug. 13, 2020, the entire contents of which is incorporated herein by reference.

[0539] LactoBacillus reuteri strain 3632 encodes/produces two mersacidins, denoted Mersacidin 1 and Mersacidin 2, which have the amino acid sequence depicted below:

Mersacidin 1:
(SEQ ID NO: 22)
MEEKELEGVIGNSFESMTVEEMTKIQGMGEYQVDSTPGYFMESAAFSAL
TANITRHAMHHH
Mersacidin 2:
(SEQ ID NO: 23)
MDKEELEKIVGNNFEEMSLQKMTEIQGMGEYQVDSTPAASAISRATIQV
SRASSGKCLSWGSGAAFSAYFTHKRWC

[0540] The mersacidin cluster from LactoBacillus reuteri strain 3632 is encoded on a conjugation plasmid of 165 kb. The BGC contains 8 genes that encode for a full suite of proteins for the synthesis of mersacidin (TABLE 23). The gene cluster is introduced into B. subtilis strain 105 to enable synthesis and production of active and effective mersacidin by the modified B. subtilis strain.

TABLE 23
Genes involved in the synthesis and secretion of mersacidin

| Locus tag | Gene | Description | Remarks |
|---|---|---|---|
| LREU3632_02344 | | Sensory histidine kinase DcuS | Regulation of mersacidin production, |
| | | | may not be essential for transferring |
| | | | the cluster to B. subtilis; this was not |
| | | | cloned in the BGC evaluated |
| LREU3632_02343 | | Hypothetical protein | Regulation of mersacidin production, |
| | | | may not be essential for transferring |
| | | | the cluster to B. subtilis; this was not |
| | | | cloned in the BGC evaluated |
| LREU3632_02342 | lagD | Lactococcin-G-processing and | Transport and cleavage of signal |
| | | transport ATP-binding protein | Peptide; integration clones were |
| | | LagD | generated with and without this lagD |
| | | | sequence |
| LREU3632_02341 | | Lanthionine synthetase C-like | Essential |
| | | protein | |
| LREU3632_02340 | | Mersacidin 1 | Essential |
| LREU3632_02339 | | Mersacidin 2 | Essential |
| LREU3632_02338 | MrsD | NADPH-dependent FMN reductase | Essential |
| | | CDS | |
| LREU3632_02337 | | Hypothetical protein | Unknown function |

[0541] Genes in the Mersacidin biosynthetic gene cluster (BGC) from Lactobacillus, particularly from LactoBacillus reuteri strain 3632, were engineered into Bacillus subtilis #105 to efficiently produce (secrete) mersacidin. The BGC cluster was chromosomally integrated and confirmed by PCR and sequencing. The final strain did not contain any antibiotic markers.

[0542] Three constructs were generated for integration in the B sub strain 105 genome. In a first initial step and construct, (i) the mersacidin pathway gene cluster and the wild type mersacidin pathway was cloned without promoters as a control sequence. The sequenced fragment was inserted into a Bacillus BGC genome integration vector (FIG. 6), including amyE sequence in left and right amyE arms for homologous recombination. The cassette is flanked by left and right amylase gene amyE arms for homologous recombination and integration at the amylase gene amyE in the Bacillus subtilis strain. The construct was then transformed into B. subtilis #105 and screened for full length insertion using PCR to verify left, right and middle portions of the mersacidin BGC. Similarly, using the cloned wild type mersacidin BGC, two promoters were inserted. This construct (2) was generated containing: Physpank promoter in front of (upstream of) LagD and a Pxyl promoter in front of the lanthione synthase C-like sequence. The remaining genes in the cassette were retained in series (FIG. 7A). The entire cloned pathway was sequence confirmed. The fragment was then inserted into Bacillus BGC genome integration vector (FIG. 6) using the left and right amyE arms for homologous recombination. In a third step and third construct (3), the lagD sequence was deleted and a single Pxl promoter was coned in front of the lanthione synthase C-like sequence. The remaining genes in the cassette were retained in series (FIG. 7B). The cloned gene cassette constructs was sequenced in its entirety to confirm all of the components and promoters. The cassette was then inserted into a suitable vector, in this instance designated as Bacillus BCG expression vector (FIG. 6). The cassette is flanked by left and right amylase gene amyE arms for homologous recombination and integration at the amylase gene amyE in the Bacillus subtilis strain. B subtilis strain 105 was transformed with the vectors under conditions to promote homologous recombination and integration and then screened for full length insertion using PCR to verify the left, right and middle portions of the Ahr PKS BGC.

[0543] The mersacidin encoding BGC was successfully engineered into B. subtilis #105 and confirmed by PCR and sequencing (data not shown). Junctional PCR confirmed the correct integration of mersacidin BGC into B. subtilis #105 genome (data not shown).

[0544] The engineered strains are evaluated for mersacidin activity as follows. The strains are grown overnight in Trypticase Soy Broth. The filter sterilized culture supernatant is evaluated for mersacidin activity by using Staphylococcus aureus as an indicator organism and determining inhibition of bacterial growth and/or bacterial killing activity. The culture supernatants are 2-fold serially diluted in 50 ul of Trypticase Soy Broth and added with 50 ul of midlog S. aureus containing approximately 1×105 cells/ml and incubated aerobically at 37° C. for 24-48 hours. Following incubation, minimum inhibitory concentration of the test material is recorded. Culture supernatant from the parent strain and an antibiotic (e.g. oxacillin, vancomycin, linezolid, tetracycline) are included as negative and positive controls, respectively.

[0545] The full sequence of the mersacidin cluster along with 5 kb flanking regions on both sides of the BGC, corresponding in total to 8742 bp is provided below (SEQ ID NO: 24).

| | |
|---|---|
| 1 | ctattttgac caatcgacca aagaggaggt tattatccac tattatagtg aatcactcat |
| 61 | gcaacagtat ctgaataaag taatataata tcagaagcaa taaatttatt tttctcagta |
| 121 | tcctgctgca cttctaccag tttacgatat attattgaac cattatctaa gtcatctacc |
| 181 | ttaaaattgt acaagaccca cctgctatgt gggtaggtaa taaaaagtca taaaaaacat |
| 241 | tatggagtaa taagtgtaaa gtaattacag gctaatcaaa aaagcagtaa ataataacta |
| 301 | tttactattc ttaatcatat tcccataaag catagtagag aaaataataa ctatacttgc |
| 361 | aatcattctg taattcatag tttgaattgc gatcattgtc actgccccac ttaaaaataa |
| 421 | caataaataa taaacacttt tctttattat ttctaacata ttagtttcct ttccatgtta |
| 481 | aatattcttg aaatgtttca aaatttatca aattatttgt tttccaatac ataacttcct |
| 541 | cactttcatc accacttttt tctctaagtt caataacctt ttttaagata ataaaaactt |
| 601 | cttcaatagc ggagcttgaa gaatgataaa acaaagactt gtcattgatg cgtttttgaa |
| 661 | tttgctttct aacacttgta acccattttt tatctctcaa ttggtattct aatgcattgc |
| 721 | agtttgcaat aacttttcct cccatacttg taagtacttt acacaaataa cctgttactg |
| 781 | tagtatttcc atttgaatta caagtactta aaactaaaca cggtttacca tctaagcgta |
| 841 | aggtatgtga ccaagtagaa agcttttcta atattaattt taaatctgac gaaatattat |
| 901 | gcatatatac tggagaagca actacaaaac agtctgattt caatatcatt tcttctaact |
| 961 | cgtaaatttt ggaatcacca tttctttgag tatagctaat atcatataac gtattcgggt |
| 1021 | tgagtctcat cttgttaaag tctctacaaa acaaatattg aactttatac tctttgctat |
| 1081 | ctagattgtt aaagaggctt tctaaaaaga attgcgtcga cccttgatat ctacaactgc |
| 1141 | cgttcagtac taatatccgt ttcaaattca tcatcctttc aaaaaagagg ctgggaaaat |
| 1201 | ttttcaccgg cctcattctt tatatcaacc ttgttaagat atcatgggga ttaaccacaa |
| 1261 | ggcggttaat tactctagca ccatctttta tgagtaaaat aagcactaaa tgctgcacca |
| 1321 | ctaccccaac ttagacattt tccagaagat gcacgtgata cttgaattgt tgcccgtgaa |
| 1381 | atcgcagaag ctgctggtgt tgaatccact tggtattcac ccataccttg aatttctgtc |
| 1441 | attttttgta aactcatttc ctcaaagtta ttacctacaa ttttttctaa ttcttctttg |
| 1501 | tccataacaa atacctccct ttaatgatga tgcatagcat gtcttgttat attggctgta |
| 1561 | agagctgaaa aggcagcact ttccataaaa tatccaggcg tcgaatctac ttgatattca |
| 1621 | cccatacctt gaatttttgt catttcctct acagtcatac tttcaaacga attccctatt |
| 1681 | acaccttcta attctttttc ttccataatt ttcaccccct ttcaatttcc aaaagtaatg |
| 1741 | gattagtttt aagcccttta tgacataata aggataaacc gatacccgaa agtccatcaa |
| 1801 | ataagcctaa cgcagaaaac tttccaaatc ttctaataga atagtcctta tttaatatgt |
| 1861 | aatttcctag cataatatta gttagtaagt tggtcttttc cttccattta gtagaacccg |
| 1921 | tctgcataaa aagttcatgc ataatcataa ttattcctgc ttttccgtgg cataatgtat |
| 1981 | cattccttgg cgcattttct aaatcattta atttttcttg tgcgtaatta ttatcaagtt |
| 2041 | gcatataatt acgcgctaaa agcattccag atactccttt acaccatccc atatcattct |
| 2101 | tcacaggagt aatttttttc attaaagcac ttgcttggtc tagctgccca atttcatata |
| 2161 | agcacattgc gtctccacaa ttaccatgcg caacaccgaa tttacctgaa tgcataatac |
| 2221 | aattcataaa ctttttttct aatctattca ttacattttg tgagatgtat ttaaatccaa |
| 2281 | ataatctttt ctgtaaatgt aaaagtttta taattccacc taaaccatta ataaaatcac |
| 2341 | taattagttc gcctttttca atgttttgct caatcttctt ttcaagctgt tttaaataag |
| 2401 | ccacttcttc ataatccaaa gttttataaa gactataatg aaataataat gggtatagtg |
| 2461 | gcgataaaaa tcccttaaag gctccttgta cctccagatc taatgacata ttaatggatg |
| 2521 | cttttaatag tttcttcgca aattctttat atctagcttc gtttttttca tatcctaatt |
| 2581 | gtataaagaa tactgttaca ccactaattc cacaatatag actttcatcc ataggtaaaa |
| 2641 | tatcccaatt gcctgcatta ttgatattta tggtcgaaat aataacacta ttttcatctt |
| 2701 | cgaatgcact attcataata gtatccgcaa tactgcttgc ttgtctcaca taattaaatt |
| 2761 | cttgatctaa caaatctcga cttttctttc ttacatcagt gattctatct cctactgata |
| 2821 | aagaagctaa tagaagtcct ctttcttttt ctatgtttc gtaattgaaa ttattgattc |
| 2881 | tatctaatgc aaggttaagt cctgatttct taaaatatgc atcataattt tttcctctac |
| 2941 | tatcagtaat acttgtcttc ccaactacag cagaaaaata gggaacatcc ccaaacagta |
| 3001 | aatcttcaac ttcactattt actattctct tatcatcata tggataagca gcaatattta |
| 3061 | acattagcct ttcacgatat ttcatttcaa cattataaga tgggtgtgct gcataattta |
| 3121 | acatcgtttc ataacgttct gtactcttcg ttaaaatacg aattctaaag tttgaaaatt |
| 3181 | ctttaacttg tttttttaac tctttaatat tattactaac aaaacttgtc attttgttat |
| 3241 | aaccatctag aatcgctaat ctatattttt ttacattaac ttctttatta ttacaggtaa |
| 3301 | ttggaatatt ttccccgcct ttaacgtatc cttgtcttct catttcaaaa tgaaaatttg |
| 3361 | aattttcaat atttacgggt acgagtactt tatttttcaa taaagtttct cttccttcta |
| 3421 | gtccacttag ttctatcgct tcattatttc ccattggtaa tttcgtgggt aataagcagg |
| 3481 | aaccctttat cgaatctcta ttcaaactca ttaaatattt tccaaacgcg ttttgaggag |
| 3541 | taattaatga attttgaaac atcgtttctc catcaacaag aattggttgg tccttttttg |
| 3601 | caattatatt ctctaaatgc aaatcgttta gccctaataa ataagaaata acaataaggt |
| 3661 | atccataacg ttcataataa tcggcacatt cgtctttact tattacagga acccgtgtta |
| 3721 | caaattcaaa aaaagcataa tctttataaa ataatccttt aggtaaaaaa tctatatcaa |
| 3781 | gtaaagttga actagactta ttaatccaat tacaaaactt ttcaaattgc tgaagaattc |
| 3841 | taagatcacg aggtttatat actatttttt tatgatttaa ttctaagatt ataactgtat |
| 3901 | ttcctttgca atgggaatct cccactccaa tttctatatt agttaagaca atgttttctt |
| 3961 | gtttaagatg taagaaatta caaagatcat ttctatgggt gccaattgcc tcaccaagtt |
| 4021 | ttgataaatt tgtcacaaaa aaattgacgc gcgttattat tattctagat aaggttggat |
| 4081 | actttcttaa aaacgcttta aatctagttt cattacaaaa gttttctttt ataaaagacg |
| 4141 | atagtacatc tgtatcagct tgactaattc ttataccaga ttttattttc tcttttttat |
| 4201 | atttatacaa ctctagtgct agcactttcc cacttttct aaataaatca ttgattagaa |
| 4261 | actcactcat agcttcgctg gctttagtag taattctaat ttgatgattc cacccatcgt |
| 4321 | ctatcctctg cattgcatat tctacaaaag gcttaaaaaa tacatctagc tttaatttat |
| 4381 | gcaaatgtat gttactaaac tgaaattttt caataatttc aaccaattct ttttcgaaag |
| 4441 | ggatctccga atctacttta attaacggtt gtaatgtttt cttaaaatca tctaacagca |
| 4501 | aatgggcatt actacagtac tctgttaaat cctgttcatt aaataaagtg cgtgtgtttt |
| 4561 | tccattcttt ataatattta tcatccagaa acggtttact atatatagca cgttcttcaa |
| 4621 | cggtaaatgc atccgttaaa tttaaggttt tcatattaca gtcctccatt tgtatttata |
| 4681 | ttttaaggat tttctataaa aggaatactt tttttattaa acgcaccata ttatgaataa |
| 4741 | ctgcgtttat agctaacttc aaaagctatt aactgtttaa ggttcattct gtataaacaa |
| 4801 | acatatgaag ttttctaaaa taaaaaccgt cctaaaactg ttagattgta taaccacaat |
| 4861 | tttagggcag ttttttctta aattgtttta ttattcacct attttgaggg ttcatattac |
| 4921 | attttttgtc atcctatgaa tttaaataag tttttttctt tttggttaat tcttcatagg |
| 4981 | taccagcttc aactattttc ccatttttta atacatatac tttattagtg gacttagcaa |
| 5041 | cagctagtct atgagtaata aaaagaattg ttttatgtaa tgtcattaaa tttttaataa |
| 5101 | ctttatgttc agtaatggga tctaggccac tggtagattc atctaatatt aatatttttg |
| 5161 | ctggcgataa aattgcccga gctattgcta agcgttgact ttgaccacca gaaagaatta |
| 5221 | agccaccttc atcgagcttt gtgttgtact ttaagggcat ttcatcaatt tcattgctga |
| 5281 | tacatgctat tttgcatgca tttataattt cttccatact cttttcttta tcacatccaa |
| 5341 | cgatcaaatt atccatgata gatcccgaga aaaggtatgt ttgctgaggc acatagcata |
| 5401 | taaaatttcg taattgataa gtactaagtt gattaatctt aactccatct actaaaatat |
| 5461 | ctccactatt tgattgtaaa aatcctacaa gtaatttagc tattgttgat tttcccgacc |
| 5521 | cactttgccc cagtaatgcc actttctcat catttttaat ccgtaaattt agttttttta |
| 5581 | aaacttcttt attattagca taatgatatg aaacattctt tatcactaat tctcccttgc |
| 5641 | ttaataaatt aagattattt tttctttgtt gtagtgtgat accattttgt tcttttttcg |
| 5701 | aaagcatcac atcatttaat ctatcattcg ctacctgtgc attttgcaat ttgggctgta |
| 5761 | aattaattaa attttgaatt gaactagtaa agtaactaaa taaagcattg aatgcgaaaa |
| 5821 | gttgtcctag tttaaaatca ttattcatta ttagatatgc tgcttgccat attattaaaa |
| 5881 | tatttaacac taactgtaca aaaactttta atgattcttg tatcgaatta gctatgttat |
| 5941 | atttcatcaa agtttttaac aagttagtaa agctattttc gatttttgca taaaattttg |
| 6001 | tttcagaatt taatgattta attacttcta taccttttat actttcaata agtaatgctt |
| 6061 | ctaactctgc attcctgatc attactttct tacttaatct atcgaataac ctagtaaaag |
| 6121 | aaataattat tacaaaataa attggaaaag aaaatactgc tagaaaaaat aaatccttac |
| 6181 | tttgaaaaaa taaagcactt cccaacgtag taacaattat tgtatctaga aaaagtgtaa |
| 6241 | cgactgaacc agctaatgct tctgtaattt tatttgcatc attaaacctt gaaacaatat |
| 6301 | cacctgttgt tctagacgaa aaaaatccta tctgcaaatc aaataatctt tttataaaat |
| 6361 | ttaaaagaat atttttcgat aagttctgtc ccaatactac tagtgcaatt ttttctaaaa |
| 6421 | aagaaaaaat tgcactaaaa aagtatagga ttatcaatcc aaacactatt atagatagta |
| 6481 | agttatattt actttttgga atcaatgaat caattacgaa ctgtaaggat aacgaactaa |
| 6541 | ttatatttat taacaatgta aagattgcaa atagcaaaat ttttattaga agcaatttat |
| 6601 | tactaaaaag ttgcttaaat aaatagttaa aattagattt tctttcatca ataggaataa |
| 6661 | agttgtctgc tttcgaaaaa aatattgctg ctccactcca ttccttaata acttcatcta |
| 6721 | tttctttttt tatggtccct attgttgggt ctggatcagc aatatacact tttttatttt |
| 6781 | taatttttaa aactacataa taatgcaaaa ttttttcttc ttttacaata tgaattataa |
| 6841 | aaggaaatgg taacttttct tttaataaaa agttgttttt tgcttttacc gccaaaggct |
| 6901 | ctaatccata ctttttagaa gcttctacta agccataaat gttcgtacct gaaatactag |
| 6961 | tattagcagc attacgcaaa tgttctagtg aaactcgact accaaattct ttaagtatca |
| 7021 | ttgctaatgc tgccactcca caatcctctt catttacttg aggaatataa ttacgataat |
| 7081 | acatatatct tcctcccacc taatcataac taaaataaat taattcgtat acaattaata |
| 7141 | ttaagcgtat ggcttttcga ttagacgcaa aaaaaggatt ttacaactaa tttagattca |
| 7201 | attataatta actaaatttc aaatttatta tattggagta atgtatatga aagacactaa |
| 7261 | ttatataaaa aaatctctag agaatcgcga aattcaaaaa ctgactgaag atgaaatgaa |
| 7321 | agctttcatt ggtggaacta cttatcatat taactacgat ggatatgcgc caagtaggaa |
| 7381 | tccatgggct tggctaactc actgggggca taaacactaa taatgaacta tataaatcca |
| 7441 | ttttacttat atgggttaga attttttgat ttatttatta acacattgtt aataaataat |
| 7501 | atagctggta aaaggaaaat aaatctactt tcaatctttg aaataggagt tatagtctta |
| 7561 | gtattgggct attatggata tacaatttac attgcatatg cacttctttt cttgtataaa |
| 7621 | aattttaaac ataataagcg ggtcttgaat tttgaagcgc ttattatgtt tgtatgcagt |
| 7681 | ttatttgtct ttcttatctc aaacattaat agtttcattc taaacacctg gtttttacca |
| 7741 | cattatagta acgatgtttt aatacgtttt caaatagtaa tttctgttat tatttctata |
| 7801 | atgttagtta gtatttcgtt tttttataat cctttatttt cgaaaatttc gaacaattta |
| 7861 | tttttaaaat ataaaggtcc aattttaaga aaatttgtaa ttacttatga agtttctttc |
| 7921 | ttctttatta taggtattgc ttctattgct gaatatttaa aaatagaatt taaaattcaa |
| 7981 | tggcttttaa ttttatgctt tctatttctt tcattaagcg taattatact gaccggtatt |
| 8041 | atgtttacat acaatagtaa aatgattcag ctcgaggaga ttagaaatag ttatattaat |
| 8101 | aaacaattgt attggaaaag ctttgaatct aactataaaa agttgagaaa actgcatcat |
| 8161 | gactatacga atcttttaat aacgttaata aggttaattg agaataatga ctttaaacat |
| 8221 | gcaaaatcct atgctaattc cttattagat tacgatagta aagtatattc gcctccttca |
| 8281 | ttcgatatta tacaaatttc tcaaaaaatt tataatcaag aattacgagc attattttta |
| 8341 | gaaaaggtga atataataaa atctcagaga attaaattgc atttggaaat ttctgataag |
| 8401 | atcgctatac cgtctaaatt attaattgat ctattaataa ttattagtaa tttactagat |
| 8461 | aatgctacga gtgcagcttt acagagtgac caaaaatcta tttctataag cttaaaaaaa |
| 8521 | acgctctcta attgttataa atttactata aagaattcaa taaaatctaa aattaatatt |
| 8581 | gaagaattat ttactgaaaa tttttcaacc aagaaaaacc atatgggaat aggacttaat |
| 8641 | aatgttattt caataattga cagttcacca aatttctttt tagaaacaaa atcttttaat |
| 8701 | gaatggatcg agtttgaact aatattaaag aggtgatgtc tt |

[0546] The amino acid sequences for cluster proteins noted in Table 23 and encoded by the gene cluster are provided below. Annotations providing their locations in the 8742 bp cluster sequence referenced above and corresponding to map locations are also indicated.

LOCUS Mersacidin_region 8742 bp DNA linear

| | |
|---|---|
| DEFINITION | Lactobacillus reuteri strain 3632. |
| SOURCE | Lactobacillus reuteri |
| ORGANISM | Lactobacillus reuteri |
| FEATURES | Location/Qualifiers |
| source | <1..>8742 |
| | /organism = ″Lactobacillus reuteri″ |
| | /mol_type = ″genomic DNA″ |
| | /strain = 3632 |
| CDS | complement(298 .. 459) |
| | /locus_tag= ″LREU3632_02337″ |
| | /inference = ″ab initio prediction: Prodigal: 2.6″ |
| | /product = ″hypothetical protein″ |

/translation = ″MLEIIKKSVYYLLLFLSGAVTMIAIQTMNYRMIASIVIIFSTML
YGNMIKNSK″ (SEQ ID NO: 25)
/standard_name = ″hypothetical protein CDS″

| | |
|---|---|
| CDS | complement (461..1030) |
| | /locus_tag = ″LREU3632_02338″ |
| | /inference = ″ab initio prediction: Prodigal: 2.6″ |
| | /inference = ″protein motif: Pfam: PF03358.9″ |
| | /product = ″NADPH-dependent FMN reductase″ |

/translation = ″MRLNPNTLYDISYTQRNGDSKIYELEEMILKSDCFVVASPVYMH
NISSDLKLILEKLSTWSHTLRLDGKPCLVLSTCNSNGNTTVTGYLCKVLTSMGGKVIA
NCNALEYQLRDKKWVTSVRKQIQKRINDKSLFYHSSSSAIEEVFIILKKVIELREKSG
DESEEVMYWKTNNLINFETFQEYLTWKGN″ (SEQ ID NO: 26)
/standard_name = ″NADPH-dependent FMN reductase CDS″

| | |
|---|---|
| CDS | complement (1275..1505) |
| | /locus_tag = ″LREU3632_02339″ |
| | /inference = ″ab initio prediction: Prodigal: 2.6″ |
| | /product = ″hypothetical protein″-Mersacidin 2 |

/translation = ″MDKEELEKIVGNNFEEMSLQKMTEIQGMGEYQVDSTPAASAISR
ATIQVSRASSGKCLSWGSGAAFSAYFTHKRWC″ (SEQ ID NO: 27)
/standard_name = ″hypothetical protein CDS″

| | |
|---|---|
| CDS | complement (1521..1706) |
| | /locus_tag = ″LREU3632_02340″ |
| | /inference = ″ab initio prediction: Prodigal: 2.6″ |
| | /product = ″hypothetical protein″-Mersacidin 1 |

/translation = ″MEEKELEGVIGNSFESMTVEEMTKIQGMGEYQVDSTPGYFMESA
AFSALTANITRHAMHHH″ (SEQ ID NO: 28)
/standard_name = ″hypothetical protein CDS″

| | |
|---|---|
| CDS | complement (1712..4654) |
| | /locus_tag = ″LREU3632_02341″ |
| | /inference = ″ab initio prediction: Prodigal: 2.6″ |
| | /inference = ″protein motif: Pfam: PF05147.7″ |
| | /product = ″Lanthionine synthetase C-like protein″-Lanthione |
| | synthetase C-like protein |

/translation = ″MKTLNLTDAFTVEERAIYSKPFLDDKYYKEWKNTRTLFNEQDLT
EYCSNAHLLLDDFKKTLQPLIKVDSEIPFEKELVEIIEKFQFSNIHLHKLKLDVFFKP
FVEYAMQRIDDGWNHQIRITTKASEAMSEFLINDLFRQSGKVLALELYKYKKEKIKSG
IRISQADTDVLSSFIKENFCNETRFKAFLRKYPTLSRIIITRVNFFVTNLSKLGEAIG
THRNDLCNFLHLKQENIVLTNIEIGVGDSHCKGNTVIILELNHKKIVYKPRDLRILQQ
FEKFCNWINKSSSTLLDIDFLPKGLFYKDYAFFEFVTRVPVISKDECADYYERYGYLI
VISYLLGLNDLHLENIIAKKDQPILVDGETMFQNSLITPQNAFGKYLMSLNRDSIKGS
CLLPTKLPMGNNEAIELSGLEGRETLLKNKVLVPVNIENSNFHFEMRRQGYVKGGENI
PITCNNKEVNVKKYRLAILDGYNKMTSFVSNNIKELKKQVKEFSNFRIRILTKSTERY
ETMLNYAAHPSYNVEMKYRERLMLNIAAYPYDDKRIVNSEVEDLLFGDVPYFSAVVGK
TSITDSRGKNYDAYFKKSGLNLALDRINNFNYETIEKERGLLLASLSVGDRITDVRKK
SRDLLDQEFNYVRQASSIADTIMNSAFEDENSVIISTININNAGNWDILPMDESLYCG
ISGVTVFFIQLGYEKNEARYKEFAKKLLKASINMSLDLEVQGAFKGFLSPLYPLLFHY
SLYKTLDYEEVAYLKQLEKKIEQNIEKGELISDFINGLGGIIKLLHLQKRLFGFKYIS
QNVMNRLEKKFMNCIMHSGKFGVAHGNCGDAMCLYEIGQLDQASALMKKITPVKNDMG
WCKGVSGMLLARNYMQLDNNYAQEKLNDLENAPRNDTLCHGKAGIIMIMHELFMQTGS
TKWKEKTNLLTNIMLGNYILNKDYSIRRFGKFSALGLFDGLSGIGLSLLCHKGLKTNP
LLLEIERG″ (SEQ ID NO: 29)
/standard_name = ″Lanthionine synthetase C-like protein CDS″

| | |
|---|---|
| CDS | complement (4934..7084) |
| | /gene = ″lagD″ |
| | /locus_tag = ″LREU3632_02342″ |
| | /EC_number = ″3.4.22.−″ |
| | /inference = ″ab initio prediction: Prodigal: 2.6″ |
| | /inference = ″similar to AA sequence: UniProtKB: P59852″ |
| | /product = ″Lactococcin-G-processing and transport ATP-binding |
| | protein LagD″ |

/translation = ″MYYRNYIPQVNEEDCGVAALAMILKEFGSRVSLEHLRNAANTSI
SGTNIYGLVEASKKYGLEPLAVKAKNNFLLKEKLPFPFIIHIVKEEKILHYYVVLKIK
NKKVYIADPDPTIGTIKKEIDEVIKEWSGAAIFFSKADNFIPIDERKSNFNYLFKQLF
SNKLLLIKILLFAIFTLLINIISSLSLQFVIDSLIPKSKYNLLSIIVFGLIILYFFSA
IFSFLEKIALVVLGQNLSKNILLNFIKRLFDLQIGFFSSRTTGDIVSRFNDANKITEA
LAGSVVTLFLDTIIVTTLGSALFFQSKDLFFLAVFSFPIYFVIIISFTRLFDRLSKKV
MIRNAELEALLIESIKGIEVIKSLNSETKFYAKIENSFTNLLKTLMKYNIANSIQESL
KVFVQLVLNILIIWQAAYLIMNNDFKLGQLFAFNALFSYFTSSIQNLINLQPKLQNAQ
VANDRLNDVMLSKKEQNGITLQQRKNNLNLLSKGELVIKNVSYHYANNKEVLKKLNLR
IKNDEKVALLGQSGSGKSTIAKLLVGFLQSNSGDILVDGVKINQLSTYQLRNFICYVP
QQTYLFSGSIMDNLIVGCDKEKSMEEIINACKIACISNEIDEMPLKYNTKLDEGGLIL
SGGQSQRLAIARAILSPAKILILDESTSGLDPITEHKVIKNLMTLHKTILFITHRLAV
AKSTNKVYVLKNGKIVEAGTYEELTKKKKTYLNS″ (SEQ ID NO: 30)
/standard_name = ″lagD CDS″

| | |
|---|---|
| CDS 7247..7420 | /locus_tag = ″LREU3632_02343″ |
| | /inference = ″ab initio prediction: Prodigal:2.6″ |
| | /product = ″hypothetical protein″ |

/translation = ″MKDTNYIKKSLENREIQKLTEDEMKAFIGGTTYHINYDGYAPSR
NPWAWLTHWGHKH″ (SEQ ID NO: 31)
/standard_name = ″hypothetical protein CDS″

| | |
|---|---|
| CDS 7423..8736 | /locus_tag = ″LREU3632_02344″ |
| | /inference = ″ab initio prediction: Prodigal: 2.6″ |
| | /inference = ″protein motif: CLUSTERS: PRK11086″ |
| | /product = ″sensory histidine kinase DcuS″ |

/translation = ″MNYINPFYLYGLEFFDLFINTLLINNIAGKRKINLLSIFEIGVI
VLVLGYYGYTIYIAYALLFLYKNFKHNKRVLNFEALIMFVCSLFVFLISNINSFILNT
WFLPHYSNDVLIRFQIVISVIISIMLVSISFFYNPLFSKISNNLFLKYKGPILRKFVI
TYEVSFFFIIGIASIAEYLKIEFKIQWLLILCFLFLSLSVIILTGIMFTYNSKMIQLE
EIRNSYINKQLYWKSFESNYKKLRKLHHDYTNLLITLIRLIENNDFKHAKSYANSLLD
YDSKVYSPPSFDIIQISQKIYNQELRALFLEKVNIIKSQRIKLHLEISDKIAIPSKLL
IDLLIIISNLLDNATSAALQSDQKSISISLKKTLSNCYKFTIKNSIKSKINIEELFTE
NFSTKKNHMGIGLNNVISIIDSSPNFFLETKSFNEWIEFELILKR″ (SEQ ID NO: 32)
/standard_name = ″sensory histidine kinase DcuS CDS″

| | |
|---|---|
| misc_feature | /note = ″Geneious type: Editing History Deletion″ |

/standard_name = ″ATGACGTTAGAGATATTATTACTTGAAGATAATCTTTTGCAA
CTTCAAAAATATAAGAAGATAATCCAGAATAGAATTATGATTAATCCTAGTAATAAAT
CTTATGATCTAGAGCTTGCACTCTACTCATCAACTTCAGATGAAATACATCAATACCT
CCATAATAATAGTAAGAAAGATATTTTTGCCTTTCTTGATATTGAAATAGGGTCTACG
TATTCAGGAATAGATATAGCAAAAGAGATTAAAAATACTGAAAGTCAAAATTTTAGAG
AAGTTTGTITTATTTCTACTTATGATAATCTTTTAATAAATATTATTAATGATCATGT
ATCACCTTTTGACTTTATTTTAAAGAATAATGGAATCAATTACGTTACCAAAAAGATT
CAAGAGAATATTGACTGGGCTTATTTAAAATATAAAGATTTAATTACTAAATCTAATC
AAGAATTATTTACATATGAGTCTTTCCCCGGATATATTCATCGCATTCCTAGAGATAA
CATTCTTTTTATATCTACTACTTCTTTGCAACATCGTTTAAGAATAACTTGTAAAGAT
AACGAAATACTTTTTCAGGGGGAATTAAAAAATATTGATTCCAAAAATAATGCATTCT
TTAGAGTAGATAGACAAATTTTAGTAAACTTAAATAATATCGATTATGTCGATTTTCA
TAAAAGAAAAATCTTCTTCAAAAATTCTAAAAACAAAAATTGTAAAATTAGTCTACGT
AAAATCCCTCTTCTTAGAAGGCTATTACAAGAAACGTCGTCGCCGGTCACCCATAAGA
AACAATGATATTACATTATATCAAGAGTTGAAATTTTGCGTATTTATTTAATGATAGA
GCGTAGTAATTCTTCATCCAAAAACCAGCAAGATCTTTAAATTTGCAGAATGATAATT
AGGTGAAGCATAGTAGTATCACTAACACAAACAAAGCCCCTTGGCAATCATAGTCGAT
TGCCAAGGGGCTTTGTTTGTGGGCTACTCTCACGAATT″ (SEQ ID NO: 33)

[0547] This invention may be embodied in other forms or carried out in other ways without departing from the spirit or essential characteristics thereof. The present disclosure is therefore to be considered as in all aspects illustrated and not restrictive, the scope of the invention being indicated by the appended Claims, and all changes which come within the meaning and range of equivalency are intended to be embraced therein.

[0548] Various references are cited throughout this Specification, each of which is incorporated herein by reference in its entirety.

1. A modified Bacillus bacteria for production or live delivery of one or more biomolecule or heterologous protein, wherein the bacteria comprises Bacillus subtilis strain 105 (ELA191105) genetically modified in one or more aspect selected from the following:
(a) genetically modified to increase competency;
(b) genetically modified to reduce or block spore formation;
(c) genetically modified to delete or inactivate one or more native protease; and
(d) genetically modified to include nucleic acid encoding one or more biomolecule or heterologous protein;
wherein the B subtilis strain 105 comprises the nucleic acid sequence set out in SEO ID NO: 1, 2, 3, 4, 5 or 6 or comprises nucleic acid that has at least 90% identity, 95% identity, 97% identity, 98% identity, 99% identity in genomic sequence to SEO ID NO: 1, 2, 3, 4 5 or 6, or
wherein the Bacillus subtilis strain corresponds to ATCC deposit PTA-126786 strain or has at least 95% identity, 97% identity, 98% identity, 99% identity in genomic sequence to the sequence of ELA191105 corresponding to ATCC deposit PTA-126786.

2. (canceled)

3. (canceled)

4. (canceled)

5. The modified Bacillus bacteria of claim 1, wherein in (a) the bacteria is modified to overexpress comK, comS, or comK and comS to increase competency, wherein competency is increased and transformation efficiency of the strain is increased by at least 20 fold, by 50 fold, by 50 fold or greater, by 60 fold, by 80 fold, by 80 fold or greater, by 90 fold, by 100 fold or by 100 fold or greater: wherein in (b) the bacteria is modified to delete or inactivate one or more native gene encoding SpoOA, SpoIVB or SpoA and SpoIVB; and/or wherein in (c) the bacteria is modified to delete or inactivate one or more native protease or the gene encoding one or more native protease selected from NprE, AprE, Epr1, Epr2, Bpr, Mpr, NprB, Vpr, and WprA.

6. The modified Bacillus bacteria of claim 5, wherein a gene cassette encoding comK and comS is integrated in the B subtilis genome.

7. (canceled)

8. (canceled)

9. (canceled)

10. The modified Bacillus bacteria of claim 5, wherein in (c) the bacteria is modified to delete or inactivate the gene encoding native proteases NprE and Vpr, or wherein the bacteria is modified to delete or inactivate the gene encoding native proteases AprE, NprB and WprA.

11. (canceled)

12. The modified Bacillus bacteria of claim 1, further genetically modified to delete or inactivate one or more native lytic enzyme or antibacterial peptide, or further genetically modified to delete or inactivate one or more native gene encoding a virulence factor, toxin or antibacterial resistance (AMR).

13. The modified Bacillus of claim 12, wherein one or more native lytic enzyme or antibacterial peptide selected from xpf, lytC1, lytC2 and sdpC are deleted or inactivated or wherein the one or more virulence factor, toxin or antibacterial resistance (AMR) is selected from macrolide 2′phosphotransferase (mphK), ABC—F type ribosomal protection protein (vmlR), Streptothricin-N-acetyltransferase (satA), tetracyclin efflux protein (tet(L)), aminoglycoside 6-adenylvltransferase (aadK) (29), and rifamycin-inactivating phosphotransferase (rphC), as set out in Table 16.

14. (canceled)

15. (canceled)

16. (canceled)

17. The modified Bacillus bacteria for production or live delivery of one or more biomolecule or heterologous protein of claim 1, wherein the modified Bacillus comprises a B. subtilis strain 105 isolate modified to overexpress comK, comS or comK and comS to increase competency; having at least at least one gene knockout selected from the following genes: spoOA, spoIIIE, spoIVB, NprE, AprE, NprB, Vpr, WprA; and modified to comprise one or more heterologous gene encoding one or more biomolecule or heterologous protein operatively linked to one or more promoter selected from a tuf promoter, sigx promoter, gros promoter, ftsh promoter, a PxylA promoter, a mannose inducible promoter, and a Physpank promoter.

18. The modified Bacillus bacteria of claim 17, wherein the one or more promoter is selected from SEQ ID NO: 66, SEQ ID NO: 67, SEQ ID NO: 68, SEQ ID NO: 69, SEQ ID NO: 40 and SEQ ID NO: 41.

19. The modified Bacillus bacteria of any of claims 1-18, wherein the one or more heterologous gene encoding one or more biomolecule or heterologous protein is integrated in the host B subtilis strain 105 genome, optionally wherein the one ormore heterologous gene encoding one ormore biomolecule or heterologous protein is integrated in the host B subtilis strain 105 genome at one or more gene locations selected from amvE, NprE, AprE, Epr1, Epr2, Bpr, Mpr, NprB, Vpr, and WprA.

20. (canceled)

21. The modified Bacillus bacteria of claim 1, wherein the one or more biomolecule or heterologous protein is selected from an anti-infective agent, anti-bacterial agent, anti-pathogen agent, immunomodulatory factor or agent, antigen, antibody, growth-promoting biomolecule, a probiotic, and a bio-based chemical.

22. (canceled)

23. The modified Bacillus bacteria of claim 21, wherein the one or more biomolecule or heterologous protein is an anti-bacterial agent and wherein the one or more anti-bacterial agent is one or more lysin or lytic peptide.

24. The modified Bacillus bacteria of claim 23, wherein the one or more lysin or lytic peptide is PlyCM, CP025C, lysostaphin or a native B. subtilis 105 lytic enzyme.

25. The modified Bacillus bacteria of claim 2J_2, wherein the one or more anti-bacterial agent is one or more antimicrobial peptide (AMP).

26. The modified Bacillus bacteria of claim 25, wherein the one or more antimicrobial peptide (AMP) is a mersacidin or a cathelicidin peptide, optionally wherein the one or more antimicrobial peptide (AMP) is a CAP18 peptide.

27. (canceled)

28. The modified Bacillus bacteria of claim 21, wherein the one or more biomolecule or heterologous protein is one or more antibody or a fragment thereof, optionally wherein the one or more antibody or fragment thereof is one or more single chain antibody, domain antibody, VHH antibody or nanobody, and optionally wherein the one or more single chain antibody, domain antibody, VHH antibody or nanobody one or more single chain antibody, domain antibody, VHH antibody or nanobody directed against a pathogenic bacteria.

29. (canceled)

30. (canceled)

31. The modified Bacillus bacteria of claim 30, wherein the one or more antibody is one or more VHH antibody or nanobody directed against Clostridium perfringens and wherein the one or more antibody is one or more VHH antibody or nanobody directed against Clostridium perfringens alpha toxin or NetB, optionally wherein the one or more VHH antibody is selected from SEQ ID NO: 97, SEQ ID NO: 98, SEQ ID NO: 101 and SEQ ID NO: 102.

32. (canceled)

33. (canceled)

34. The modified Bacillus bacteria of claim 21, wherein the one or more biomolecule or heterologous protein is one or more antigen and wherein said antigen is capable of stimulating an immune response against a parasite, bacteria, or virus.

35. The modified Bacillus bacteria of claim 34, wherein the one or more biomolecule or heterologous protein is one or more antigen capable of stimulating an immune response against an Eimeria parasite and wherein the one or more antigen is selected from Eimeria tenella elongation factor-1α, EtAMA1, EtAMA2, Eimeria tenella 5401, Eimeria acervuline lactate dehydrogenase antigen gene, Eimeria maxima surface antigen gene, Glyceraldehyde 3-phosphate Dehydregenase (GAPDH) and Eimeria common antigen 14-3-3.

36. (canceled)

37. The modified Bacillus bacteria of claim 36, wherein the one or more antigen is an Eimeria antigen encoded by one or more of SEQ ID NO: 105, SEQ ID NO: 106, SEQ ID NO: 107, SEQ ID NO: 108, or SEQ ID NO: 109.

38. The modified Bacillus bacteria of claim 1, wherein the one or more heterologous gene encoding one or more biomolecule or heterologous protein is provided on a biosynthetic gene cluster (BGC) and wherein the BGC or a portion thereof is integrated in the host B subtilis strain 105 genome.

39. The modified Bacillus bacteria of claim 38, wherein the biosynthetic gene cluster (BGC) is a PKS BGC or a mersacidin BGC, wherein the PKS BGC is capable of producing an AhR-activating metabolite, or wherein the mersacidin BGC is capable of producing one or more mersacidin polypeptide SEQ ID NO: 22 or SEQ ID NO: 23 capable of inhibiting or killing one or more bacteria or virus.

40. (canceled)

41. (canceled)

42. The modified Bacillus bacteria of claim 39, wherein the PKS BGC comprises the nucleic acid set out in SEQ ID NO: 110 or comprises nucleic acid encoding one or more polypeptide selected from SEQ ID NOs: 7-21, or wherein the mersacidin BGC comprises the nucleic acid set out in SEQ ID NO: 24 or comprises nucleic acid encoding one or more polypeptide selected from SEQ ID NOs: 25-32.

43. (canceled)

44. The modified Bacillus bacteria of claim 21, wherein the one or more biomolecule or heterologous protein is a bio-based chemical, optionally wherein the bio-based chemical is gamma polyglutamic acid (γ-PGA).

45. (canceled)

46. The modified Bacillus bacteria of claim 45, wherein the γ-PGA is encoded by the CapABC locus and the B subtilis strain 105 is modified to produce increased amounts of γ-PGA by integrating at least one additional copy of the CapABC locus in B subtilis strain 105 genome, optionally wherein at least one additional copy of the CapABC locus is integrated in B subtilis strain 105 genome at one or more gene locus selected from amvE, nprE, apr and wprA.

47. (canceled)

48. The modified Bacillus bacteria of claim 1, wherein the one or more heterologous gene encoding one or more biomolecule or heterologous protein includes a native B subtilis 105 strain or other bacterial strain signal sequence for secretion of the one or more biomolecule or heterologous protein by the modified bacteria optionally wherein the native B subtilis 105 strain or other bacterial strain signal sequence for secretion is selected from SEO ID NO: 43, SEO ID NO: 44, SEO ID NO: 46, SEO ID NO: 47, SEO ID NO: 49, and SEO ID NOs: 50-64.

49. (canceled)

50. A live delivery platform comprising a genetically-modified Bacillus bacteria for production of one or more biomolecules or heterologous proteins in an animal, wherein the modified Bacillus comprises Bacillus subtilis strain 105 (ELA191105) genetically modified to include nucleic acid encoding one or more biomolecule or heterologous protein which is produced and delivered upon administration of the modified Bacillus bacteria to the animal, wherein the bacteria comprises Bacillus subtilis strain 105 (ELA191105) genetically modified in one or more aspect selected from the following:
(a) genetically modified to increase competency:
(b) genetically modified to reduce or block spore formation:
(c) genetically modified to delete or inactivate one or more native protease; and
(d) genetically modified to include nucleic acid encoding one or more biomolecule or heterologous protein:
wherein the Bacillus subtilis strain 105 comprises the nucleic acid sequence set out in SEQ ID NO: 1 or comprises at least 95% identity, 97% identity, 98% identity, 99% identity in genomic sequence to SEO ID NO: 1, or
wherein the Bacillus subtilis strain corresponds to ATCC deposit PTA-126786 strain or has at least 95% identity, 97% identity, 98% identity, 99% identity in genomic sequence to the sequence of ELA191105 corresponding to ATCC deposit PTA-126786.

51. (canceled)

52. (canceled)

53. (canceled)

54. The live delivery platform of claim 50, wherein the Bacillus subtilis bacteria is genetically modified to include nucleic acid encoding one or more biomolecule or heterologous protein and comprises an expression cassette;
wherein the expression cassette comprises one or more of:
a promoter for transcriptional expression,
a nucleic acid sequence encoding a signal sequence for secretion,
at least one heterologous coding region encoding a desired biomolecule or heterologous protein, and terminators for translation and transcription termination.

55. The live delivery platform of claim 54, wherein the promoter for transcriptional expression is one or more promoter selected from a tuf promoter, sigx promoter, gros promoter, ftsh promoter, a PxylA promoter, a mannose inducible promoter, and a Physpank promoter, optionally wherein the one or more promoter is selected from SEO ID NO: 66, SEO ID NO: 67, SEO ID NO: 68, SEO ID NO: 69, SEO ID NO: 40 and SEO ID NO: 41.

56. (canceled)

57. The live delivery platform of claim 54, wherein the nucleic acid sequence encoding a signal sequence for secretion encodes at least 20 amino acids, at least 25 amino acids, at least 30 amino acids, at least 35 amino acids, at least 40 amino acids, at least 44 amino acids, at least 50 amino acids, at least 55 amino acids, at least 60 amino acids, or at least 65 amino acids, optionally wherein the nucleic acid sequence encoding a signal sequence for secretion encodes a native B subtilis 105 strain or other bacterial strain signal sequence for secretion comprising a sequence selected from SEO ID NO: 43, SEO ID NO: 44, SEO ID NO: 46, SEO ID NO: 47, SEO ID NO: 49, and SEO ID NOs: 50-64.

58. (canceled)

59. The live delivery platform of claim 50, wherein the expression cassette or the at least one heterologous coding region encoding a desired biomolecule or heterologous protein is integrated in the host B subtilis strain 105 genome, optionally wherein the expression cassette or the at least one heterologous coding region encoding a desired biomolecule or heterologous protein is integrated in the host B subtilis strain 105 genome at one or more gene locations selected from amvE, NprE, AprE, Epr1, Epr2, Bpr, Mpr, NprB, Vpr, and WprA.

59. (canceled)

60. The live delivery platform of claim 50, wherein desired biomolecule or heterologous protein is selected from an anti-infective agent, anti-bacterial agent, anti-pathogen agent, immunomodulatory factor or agent, antigen, antibody, growth-promoting biomolecule, a probiotic, and a bio-based chemical.

61. A method of reducing colonization of an animal by a pathogenic bacterium, parasite or virus, the method comprising treating an animal with the modified Bacillus bacteria of claim 1.

62. The method of claim 61, wherein the animal is a bird, a human, or a non-human mammal.

63. The method of claim 61, wherein the pathogenic bacterium is selected from the group consisting of Salmonella, Clostridium, Campylobacter, Staphylococcus, Streptococcus, and an E. coli bacterium, or wherein the pathogenic parasite is Eimeria.

64. (canceled)

65. The method of claim 61, wherein the modified Bacillus bacteria is administered orally, parentally, nasally, or mucosally, or wherein the animal is a bird and wherein treatment is administered in ovo.

66. (canceled)

67. (canceled)

68. (canceled)

69. (canceled)

The application's sequence listing, which the Patent Office published only in electronic form, follows.

SEQUENCE LISTING (111 sequences)

SEQ ID NO: 1 - DNA, 4089676 bp, Bacillus subtilis (residues 1-2,044,838 of 4,089,676)
  source 1..4089676: mol_type = genomic DNA
atggaaaatatattagacctgtggaaccaagcccttgctcaaatcgaaaaaaagttgagcaaaccgagttttgagacttggatgaagtcaaccaaagcccactcactgcaaggcgatacattaacaatcacggctcccaatgaatttgccagagactggctggagtccagatacttgcatctgattgcagatactatatatgaattaaccggggaagaattgagcattaagtttgtcattcctcaaaatcaagatgttgaggactttatgccgaaaccgcaagtcaaaaaagcggtcaaagaagatacatctgattttcctcaaaatatgctcaatccaaaatatacttttgatacttttgtcatcggatctggaaaccgatttgcacacgctgcttccctcgcagtagcggaagcacccgcgaaagcttacaaccctttatttatctatgggggcgtcggcttagggaaaacgcacttaatgcatgcgatcggccattatgtaatagatcataatccttctgccaaagtggtttatctgtcttctgagaaatttacaaacgaattcatcaactctatccgagataataaagccgtcgacttccgcaatcgctatcgaaatgttgatgtgcttttgatagatgatattcaatttttagcggggaaagaacaaacccaggaagaatttttccatacatttaacacattgcacgaagaaagcaaacaaatcgtcatttcaagtgatcgaccgccaaaggaaattccgacacttgaggacagattgcgctcacgttttgaatggggacttattacagatatcacaccgcctgatctagaaacgagaattgcgattttaagaaaaaaagccaaagcagaaggcctcgatattccgaacgaggttatgctttacatcgcgaatcaaatcgacagcaatattcgggaactcgaaggagcattaatcagagttgtcgcttattcatctttaattaataaagatattaatgctgatctggccgctgaggcgttgaaagatattattccttcctcaaaaccgaaagtcattacgataaaagaaattcagagggtagtaggccagcaatttaatattaaactcgaggatttcaaagcaaaaaaacggacaaagtcagtagcttttccgcgtcaaatcgccatgtacttatcaagggaaatgactgattcctctcttcctaaaatcggtgaagagtttggaggacgtgatcatacgaccgttattcatgcgcatgaaaaaatttcaaaactgctggcagatgatgaacagcttcagcagcatgtaaaagaaattaaagaacagcttaaatagcaggaccggggatcaatcggggaaagtgtgaataacttttcggaagtcatacacagtctgtccacatgtggataggctgtgtttcctgtctttttcacaacttatccacaaatccacaggccctactattacttctactattttttataaatatatatattaatacattatccgttaggaggataaaaatgaaattcacgattcaaaaagatcgtcttgttgaaagtgtccaagatgtattaaaagcagtttcatccagaaccacgattcccattctgactggtattaaaattgttgcatcagatgatggagtatcctttacagggagtgactcagatatttctattgaatccttcattccaaaagaagaaggagataaagaaattgtcactattgaacagcccggaagcatcgttttacaggctcgcttttttagtgaaattgtaaaaaaattgccgatggcaactgtagaaatcgaagtccaaaatcagtatttgacgattatccgttctggtaaagctgaatttaatctaaacggactggatgctgatgagtatccgcacttgcctcagattgaagagcatcatgcgattcagatcccaactgatttgttaaaaaatctaatcagacaaacagtatttgcagtgtccacctcagaaacacgccctatcttgacaggtgtaaactggaaagtggagcaaagtgaattattatgcactgcaacggatagccaccgtcttgcattaagaaaggcaaaacttgatattccagaagacagatcttataacgtcgtgattccgggaaaaagtttaactgaactcagcaagattttagatgacaaccaagaacttgtagatatcgtcatcacagaaacccaagttctgtttaaagcgaaaaacgtcttattcttctcacggcttctggacgggaattatccagacacaaccagcctgattccgcaagacagcaaaacagaaatcattgtgaacacaaaagaattccttcaggccattgatcgtgcatctcttttagctagagagggacgcaacaacgttgtaaaactgtccgcaaaaccggctgaatccattgaaatttcttccaactccccggaaatcggtaaagttgtggaagcaattgctgcggatcaaattgaaggtgaggaattaaatatctcttttagtccaaaatatatgctggatgcactaaaggtgcttgaaggagcagaaatacgcgtaagctttacaggcgcaatgagacctttcttaattcgcacgccgaatgatgaaacgattgtacagcttatcctccctgtcagaacctattaatccgatacactgctgccgacccgtcggcagcttttctattcggtatctgctccgacaagttttccctttccctaattcgtttttttttagtacaattagatattagtgatatttgaaagaggtcgatataatggcaaatccgatttcaattgatacagagatgattacactcggacaattcttaaaattagccgatgtgattcagtctggcggtatggcgaagtggtttttaagcgagcatgaagtgcttgtgaacgatgagccggacaaccgccggggcagaaaactgtatgttggagatgtggtagagattgaaggatttggttcatttcaagtcgtcaattaaagcgggtgacactgattgtatatccagaacttagaactgacatcttaccgcaactacgaccatgctgaacttcaatttgaaaataaagtaaatgtgatcatcggagaaaacgcccaggggaagacaaacctcatggaggcgatctatgtcttgtccatggcgaaatcgcaccggacatcaaatgacaaagaacttatacggtgggacaaagactatgctaaaatagagggaagagtgatgaagcaaaacggggcgatcccgatgcagctcgtcatctccaaaaagggtaaaaagggcaaggtcaatcatattgaacagcaaaagctcagccagtatgtcggagccctcaacaccattatgttcgcgccggaagatttaaatcttgtaaagggaagccctcaagtgagaaggcggtttcttgacatggaaatcggacaggtttctctcgtctaccttcatgatctttctctttaccagaaaatcctttcccagcggaatcattttttgaaacagctgcaaacaagaaaacaaactgaccggacgatgctcgatgttctgaccgatcagcttgtagaagttgcagcaaaagtcgtcgtaaaacgcctgcagtttacagcacagctcgagaaatgggcgcagcccatccatgcaggcatctcaagagggcttgaagaactgaccctgaaataccatacagctcttgaggtatcagatcccctagatttgtcgaaaataggagatagctatcaagaagcgttttctaaattaagagaaaaagaaattgagcgtggtgtgacgctgtcagggcctcatcgcgatgatgttcttttctatgtgaacggacgcgatgtgcagacgtatggttctcaaggacagcagcgaacgacggcgttgtcccttaagctggcggagattgacctgatccatgaagaaatcggagaatatcccattttactattggatgatgtactgagtgaactggatgattatcgccagtcacacttgcttcatacgatccaaggccgtgtacaaacgtttgtcacaacgacaagcgttgatggcattgatcacgaaaccttacgtcaagcaggaatgttccgtgtgcaaaatggtgcgttagtgaagtgaagaaatgaggtgagcaattgtatattcatttaggtgatgactttgtggtttcaacacgagatattgtcggcatttttgactttaaagccaacatgtcgcctattgttgaagaatttctgaaaaaacagaaacacaaggtggtgcctttcgtaaacggcacgcccaaatctatcgtagtcacggttcagaatatatattactctcccttatcttccagcacattaaaaaaacgtgcgcaatttatgtttgaaatagattcttagaaattttttatcacgaatatatcgtttagaaaagtgtaggtgaatgacgtggctatggaacagcagcaaaacagttatgatgaaaatcagatacaggtactagaaggattggaagctgttcgtaaaagaccggggatgtatatcggttcgacaaacagcaaaggccttcaccacctggtatgggaaattgtcgacaatagtattgacgaagccctcgccggttattgtacggatatcaatatccaaatcgaaaaagacaacagtatcacggttgtagataatggccgcggtattccagtcggtattcatgaaaaaatgggccgtcctgcggtagaagtcattatgacggtacttcatgccggaggaaaatttgacggaagcggctataaagtatccggaggattacacggtgtaggtgcgtctgtcgtaaacgcactatcaacagagcttgatgtgacggttcaccgtgacggtaaaattcaccgccaaacttataaacgcggagttccggttacagaccttgaaatcattggcgaaacggatcatacaggaacgacgacacattttgtcccggaccctgaaattttctcagaaacaaccgagtatgattatgatctgcttgccaaccgcgtacgtgaattagcctttttaacaaagggcgtaaacatcacgattgaggataaacgtgaaggacaagagcgcaaaaatgaataccattacgaaggcggaattaaaagttatgtagagtatttaaaccgctctaaagaggttgtccatgaagagccgatttacattgaaggcgaaaaggacggcattacggttgaagtggctttgcaatacaatgacagctacacaagcaacatttactcgtttacaaacaacattaacacgtacgaaggcggtacccatgaagctggcttcaaaacgggcctgactcgtgttatcaacgattacgccagaaaaaaagggcttattaaagaaaatgatccaaacctaagcggagatgacgtaagggaagggctgacagcgattatttcaatcaaacaccctgatccgcagtttgagggccaaacgaaaacaaagctgggcaactcagaagcacggacgatcaccgatacgttattttctacggcgatggaaacatttatgctggaaaatccagatgcagccaaaaaaattgtcgataaaggcttaatggcggcaagagcaagaatggctgcgaaaaaagcccgtgaactaacacgtcgtaagagtgctttggaaatttcaaacctgcccggtaagttagcggactgctcttcaaaagatccgagcatctccgagttatatatcgtagagggtgactctgccggaggatctgctaaacaaggacgcgacagacatttccaagccattttgccgcttagaggtaaaatcctaaacgttgaaaaggccagactggataaaatcctttctaacaacgaagttcgctctatgatcacagcgctcggcacaggtattggggaagacttcaaccttgagaaagcccgttaccacaaagttgtcattatgacagatgccgatgttgacggcgcgcacatcagaacactgctgttaacgttcttttacagatatatgcgccaaattatcgaaaatggctacgtgtacattgcgcagccgccgctctacaaggttcaacaggggaaacgcgttgaatatgcgtacaatgacaaggagctggaagagctgttaaaaactcttcctcaaacgcctaagcctggactgcagcgttacaaaggtcttggtgaaatgaatgccacccagctatgggagacaaccatggatcctagttccagaacacttcttcaggtaactcttgaagatgcaatggatgcggacgagacttttgaaatgcttatgggcgacaaggtagaaccgcgccgaaacttcatagaagcgaatgcgagatacgttaaaaatcttgacatctaatcataaaaagccttatttccaataagaaataaggcttttttctgaacaagatcagatgcagcaatgcttgcagtacctatatattctagcaatttaatgtgtataatcataagtttattgatataatggagaatagtgaaatcgtattgaaggtcataatggacaatctactcccacatatttcatgtgatacttcagggaggttttttaatgagtgaacaaaacacaccacaagttcgtgaaataaatatcagtcaggaaatgcgtacgtccttcttggattatgcaatgagcgttatcgtgtcccgtgctcttccagatgttcgagacggtttaaaaccggttcatagacggattttgtatgcaatgaatgatttaggcatgacaagtgacaagccttataaaaaatccgcgcgtatcgttggagaagttatcgggaaataccacccgcacggtgattcagcggtatatgaatccatggtcagaatggctcaggatttcaactaccgttatatgctcgttgacggtcacggaaacttcggttctgttgacggagactcagcggcggccatgcgttatacagaagcaagaatgtctaaaatctcaatggagattcttcgcgacatcacaaaagacacaatcgattaccaggataactatgacgggtcagaaagagaacctgtcgttatgccttcaaggttcccgaatctgctcgtgaacggtgctgccggcattgcggtaggtatggcaacaaacattcctccgcaccagctgggagaaatcattgacggtgtacttgctgtcagtgagaatccggacattacaattccagagcttatggaagtcattccagggcctgatttcccgaccgcgggtcaaatcttgggacgcagcggtatccggaaagcatacgaatcaggccgaggctctatcacgatccgggcaaaagctgagatcgaacaaacatcttcgggtaaagaaagaattatcgttacagagttaccttaccaagtaaataaggctaaattaattgagaaaattgcagatctcgtaagggacaaaaagatagagggtatcacagatctgcgtgatgagtcagatcgtacaggtatgagaattgtcattgaaatcagacgcgacgccaatgcaaatgtcatcttaaacaatctgtacaaacaaactgctctacaaacatcttttggcatcaacctgcttgcacttgttgatggccagccgaaagttttaactcttaagcaatgcctggagcattacctcgaccatcaaaaagttgtcattagacgccgtactgcttatgaattgcgtaaagcggaagcgagagctcatatcctggaaggattgagagttgcactggatcatctcgatgcagttatctcccttatccgtaattctcaaacggctgaaattgcgagaacaggtttaattgaacaattctcactgacagagaagcaagcacaagcgatccttgatatgaggctccagcgtttaacgggactggaacgtgaaaagatagaagaagaataccaatctcttgttaaattaattgcagagctaaaagacatcttggcaaatgaatataaagtgcttgagatcattcgtgaagaactcacggaaatcaaagagcgttttaacgatgaaagacgtactgagatcgtcacttctggactggagactattgaagatgaagatctcatcgagagagaaaatatcgtagttactctgacgcacaacggatacgtcaaacgtcttcctgcatcaacttaccgcagtcaaaaacgaggcggaaaaggtgtacaaggtatgggaacaaacgaagatgatttcgttgagcatttgatctctacgtcaactcatgacacgattctcttcttctcgaacaaggggaaagtgtatcgtgcaaaagggtatgaaatccctgaatacggcagaacggcaaaaggaatcccgattattaacctgctggaggtagaaaagggtgagtggatcaacgcgattattccagtcacggaattcaatgcggagctttaccttttcttcactacaaagcatggggtttcaaaacgaacatcgctatctcaattcgctaatatccgcaacaatggtctaatcgctctgggtcttcgtgaagatgatgaactgatgggtgtacgtctgactgacggcacaaaacaaatcatcattggaacgaaaaacggtttactgatccgtttccctgaaacagatgtccgggagatgggaagaactgcggcgggcgtaaaaggcatcaccctgacggatgacgacgttgttgtcggcatggagatattagaggaagaatcacacgtccttatcgtaactgaaaaagggtacggaaaacgaactccggctgaagagtacagaacccaaagccggggcggaaaaggactcaaaacagcgaaaatcaccgagaacaacggccaactagtagcagtgaaagctactaaaggtgaagaggatctaatgattattacagctagcggcgtactcatcagaatggacatcaatgatatctccatcaccggacgtgtcactcaaggtgtgcgtctcatcagaatggcagaagaagagcatgttgctacagtagctttagtagagaaaaacgaagaagatgagaatgaagaagaacaagaagaagtgtgagaaaaagcgcagctgaaatagctgcgcttttttgtgtcataaccctttacagtcataaaaattatggtataatcatttttgttgtctttttaaagacacaagcatgaccattatgactagtaaaaacttttttaaaaaagtattgacctagttaactaaaaatgttactattaagtagtcgcttcgagagaagcacacaaagttctttgaaaactaaacaagacaaaacgtacctgttaattcatttttaaaaatcgcacagcgatgtgcgtagtcagtcaaactagggcctgcacgacgcaggtcacacaggtgtcgccgcaggatgcggtgaacttaacctgtgatccatttatcggagagtttgatcctggctcaggacgaacgctggcggcgtgcctaatacatgcaagtcgagcggacagatgggagcttgctccctgatgttagcggcggacgggtgagtaacacgtgggtaacctgcctgtaagactgggataactccgggaaaccggggctaataccggatggttgtttgaaccgcatggttcaaacataaaaggtggcttcggctaccacttacagatggacccgcggcgcattagctagttggtgaggtaacggctcaccaaggcaacgatgcgtagccgacctgagagggtgatcggccacactgggactgaggcacggcccagactcctacgggaggcagcagtagggaatcttccgcaatggacgaaagtctgacggagcaacgccgcgtgagtgatgaaggttttcggatcgtaaagctctgttgttagggaagaacaagtaccgttcgaatagggcggtaccttgacggtacctaaccagaaagccacggctaactacgtgccagcagccgcggtaatacgtaggtggcaagcgttgtccggaattattgggcgtaaagggctcgcaggcggtttcttaagtctgatgtgaaagcccccggctcaaccggggagggtcattggaaactggggaacttgagtgcagaagaggagagtggaattccacgtgtagcggtgaaatgcgtagagatgtggaggaacaccagtggcgaaggcgactctctggtctgtaactgacgctgaggagcgaaagcgtggggagcgaacaggattagataccctggtagtccacgccgtaaacgatgagtgctaagtgttagggggtttccgccccttagtgctgcagctaacgcattaagcactccgcctggggagtacggtcgcaagactgaaactcaaaggaattgacgggggcccgcacaagcggtggagcatgtggtttaattcgaagcaacgcgaagaaccttaccaggtcttgacatcctctgacaatcctagagataggacgtccccttcgggggcagagtgacaggtggtgcatggttgtcgtcagctcgtgtcgtgagatgttgggttaagtcccgcaacgagcgcaacccttgatcttagttgccagcattcagttgggcactctaaggtgactgccggtgacaaaccggaggaaggtggggatgacgtcaaatcatcatgccccttatgacctgggctacacacgtgctacaatggacagaacaaagggcagcgaaaccgcgaggttaagccaatcccacaaatctgttctcagttcggatcgcagtctgcaactcgactgcgtgaagctggaatcgctagtaatcgcggatcagcatgccgcggtgaatacgttcccgggccttgtacacaccgcccgtcacaccacgagagtttgtaacacccgaagtcggtgaggtaaccttttaggagccagccgccgaaggtgggacagatgattggggtgaagtcgtaacaaggtagccgtatcggaaggtgcggctggatcacctcctttctaaggatattatacggaatataagaccttgggtcttataaacagaacgttccctgtcttgtttagttttgaaggaactttgttccttgaataagttaagatgggcctgtagctcagctggttagagcgcacgcctgataagcgtgaggtcggtggttcgagtccactcaggcccaccatcttatataacggggccttagctcagctgggagagcgcctgctttgcacgcaggaggtcagcggttcgatcccgctaggctccaccaacgtgttctttgaaaactagataacagtagacatcacattcaattagtaatacaagatatcacatagtgattctttttaacggttaagttagaaagggcgcacggtggatgccttggcactaggagccgatgaaggacgggacgaacaccgatatgcttcggggagctgtaagcaagctttgatccggagatttccgaatggggaaacccaccactcgtaatggagtggtatccatatctgaattcataggatatgagaaggcagacccggggaactgaaacatctaagtacccggaggaagagaaagcaaatgcgattccctgagtagcggcgagcgaaacgggattagcccaaaccaagaggcttgcctcttggggttgtaggacactctgtacggagttacaaaggaacgaggtagatgaagaggtctggaaaggcccgccataggaggtaacagccctgtagtcaaaacttcgttctctcctgagtggatcctgagtacggcggaacacgtgaaattccgtcggaatccgggaggaccatctcccaaggctaaatactccctagtgaccgatagtgaaccagtaccgtgagggaaaggtgaaaagcaccccggaaggggagtgaaagagatcctgaaaccgtgtgcctacaagtagtcagagcccgttaacgggtgatggcgtgccttttgtagaatgaaccggcgagttacgatcccgtgcaaggttaagcagaagatgcggagccgcagcgaaagcgagtctgaatagggcgcatgagtacgtggtcgtagacccgaaaccaggtgatctacccatgtccagggtgaagttcaggtaacactgaatggaggcccgaacccacgcacgttgaaaagtgcggggatgaggtgtgggtaggggtgaaatgccaatcgaacctggagatagctggttctctccgaaatagctttagggctagcctcaaggtaagagtcttggaggtagagcactgattggactaggggcccctaccgggttaccgaattcagtcaaactccgaatgccaatgacttatccttgggagtcagactgcgagtgataagatccgtagtcgaaagggaaacagcccagaccgccagctaaggtcccaaagtatacgttaagtggaaaaggatgtggagttgcttagacaaccaggatgttggcttagaagcagccaccatttaaagagtgcgtaatagctcactggtcgagtgactctgcgccgaaaatgtaccggggctaaacgtatcaccgaagctgcggactgttcttcgaacagtggtaggagagcgttctaagggctgtgaagccagaccggaaggactggtggagcgcttagaagtgagaatgccggtatgagtagcgaaagaggggtgagaatcccctccaccgaatgcctaaggtttcctgaggaaggctcgtccgctcagggttagtcgggacctaagccgaggccgaaaggcgtaggcgatggacaacaggttgatattcctgtaccacctcctcaccatttgagcaatggggggacgcaggaggatagggtaagcgcggtattggatatccgcgtccaagcagttaggctgggaaataggcaaatccgtttcccataaggctgagctgtgatggcgagcgaaatatagtagcgaagttcctgattccacactgccaagaaaagcctctagcgaggtgagaggtgcccgtaccgcaaaccgacacaggtaggcgaggagagaatcctaaggtgatcgagagaactctcgttaaggaactcggcaaaatgaccccgtaacttcgggagaaggggtgctctgttagggtgcaagcccgagagagccgcagtgaataggcccaggcgactgtttagcaaaaacacaggtctctgcgaagccgtaaggcgaagtataggggctgacgcctgcccggtgctggaaggttaagaggagcgcttagcgtaagcgaaggtgcgaattgaagccccagtaaacggcggccgtaactataacggtcctaaggtagcgaaattccttgtcgggtaagttccgacccgcacgaaaggcgcaacgatctgggcactgtctcaacgagagactcggtgaaattatagtacctgtgaagatgcaggttacccgcgacaggacggaaagaccccgtggagctttactgcagcctgatattgaatgttggtacagcttgtacaggataggtaggagccttggaaaccggagcgccagcttcggtggaggcatcggtgggatactaccctggctgtattgaccttctaacccgccgcccttatcgggcggggagacagtgtcaggtgggcagtttgactggggcggtcgcctcctaaaaggtaacggaggcgcccaaaggttccctcagaatggttggaaatcattcgcagagtgtaaaggcacaagggagcttgactgcgagacctacaagtcgagcagggacgaaagtcgggcttagtgatccggtggttccgcatggaagggccatcgctcaacggataaaagctaccccggggataacaggcttatctcccccaagagtccacatcgacggggaggtttggcacctcgatgtcggctcatcgcatcctggggctgtagtcggtcccaagggttgggctgttcgcccattaaagcggtacgcgagctgggttcagaacgtcgtgagacagttcggtccctatccgtcgcgggcgcaggaaatttgagaggagctgtccttagtacgagaggaccgggatggacgcaccgctggtgtaccagttgttctgccaagggcatcgctgggtagctatgtgcggacgggataagtgctgaaagcatctaagcatgaagcccccctcaagatgagatttcccattccgcaaggaagtaagatccctgaaagatgatcaggttgataggtctgaggtggaagtgtggcgacacatggagctgacagatactaatcgatcgaggacttaaccatatttttgaatgatgtcacacctgttatctagttttgagagaacactctcaatttgtttggtggcgatagcgaagaggtcacacccgttcccataccgaacacggaagttaagctcttcagcgccgatggtagtcgggggtttccccctgtgagagtaggacgccgccaagcaagcttaaacccagctcattgagctgggttttttgtttgttaaaaatgaagaagaaactgtgaagcgtatttagggaatttattttctgatactaataaaaactgctgaattaacacgtagtcatcacttatatgctgtgttaataactcataccaccattctgtttcataccttgcaatcatcccaacgttgtacaaaatcaaataatgaattgtcatttcgggaagcctcagaaattgctccctttgagaagggatataatattggttcttttccatgtcaaacaataagctggtcgatgtccatggctccttgtcttgtggtgaaatttcgaacagcagcccgtgttcatttttttttgtaaaagaccattgataatgatgggacatgtattcagcaaaccttgaatcagacattttgtaattgattactacttcctccggtataaaaatttcgttcttatccttctcaacttttgtcataaatcgttctttctgctgaaagtagaaaatatcgctaagttctggaatggccattaataattttttcatggtataccgttcatctactatatccgattgtccaaataaatgtttcataaaatgtacgcataggccattccgttgtattttcacttcatcgtcgctaaaacaataattttgtttctttcgttttcttgttgttacgccatgtgccagtactgatgtatggcttggataatgaggatcacgtgtaattaagcatgctttgataagctgtgccattccataaaataaaagaatcggtttgatttctaagggagaatatgcagcttgtttataaaacgattcggcatgctttaagaaataaataaaccgttcactgtttttaaaagagttttttttcgcatcgtcaataccgtttaagatataaaccttttctagaaatttctgggttgattcaacggagtaaaatagcgctaagtctttccactcatgatatgtcatgtatatttcttaatcctttccgttatctaaatatttcaactctttcccgcttccttgacatgctcttggctagttgataatctacatataatattttgccgaaaagagggggatttactaatgtgggaaagtaaattttcaaaagaaggcttaacgttcgacgatgtgctgcttgtaccagcaaagtctgaggtacttccgcgtgatgtggatttatctgtagaacttacaaaaacgttaaagctaaatattcctgtcatcagcgcaggtatggacactgtaacagaatcagcaatggcaattgcaatggcaagacagggcggcttgggcatcattcacaaaaatatgtccattgaacagcaggctgaacaagttgataaagtaaagcgttctgagcgcggcgttatcacaaatcccttctttttaactcctgatcaccaagtatttgatgcggagcatttgatggggaaatacagaatttccggtgttccgattgtaaataacgaagaagaccagaagcttgttggaattattacaaaccgtgaccttcgttttatttctgactactcaatgaaaatcagcgacgtcatgacgaaagaagagctagttactgcatctgtaggaactactctggatgaagctgaaaagattttgcagaaacataaaattgaaaagcttcctctcgtagatgaccagaataaattaaaaggtcttatcacaattaaagacattgaaaaagtcattgagttcccgaactcatctaaagacattcacggccgcctgatcgttggcgcggcagttggtgtaactggcgatacaatgactcgcgtcaaaaagcttgttgaagccaatgttgatgtgattgttatcgatacagctcacggacactctcaaggcgttttaaacacagtcacaaaaattcgtgaaacgtatcccgaattaaacattattgctggaaacgtggcaacagctgaagcgacaagagcgcttatcgaagctggagcagacgttgtcaaagttggaataggacctggttcaatttgtactacacgtgttgtagccggcgtcggtgttccgcaaattacagcaatttatgattgtgcgactgaagcaagaaaacacggcaaaacaatcatagccgatggtgggattaaattctctggcgatatcactaaagcgttggcagccggcggacatgctgttatgctcggaagcttgcttgcaggcacatctgaaagccctggtgaaactgaaatctatcaaggcagaagatttaaggtataccgcggcatgggatcagttgctgcaatggaaaaaggaagtaaagaccgttacttccaagaagaaaacaaaaaatttgttcctgaaggaattgaaggacgcacaccttacaaagggccagttgaagaaaccgtttatcagctagtcggaggccttcgttctggtatggggtattgcgggtccaaagatctgcgtgcgctaagagaagaagctcagttcattcgcatgactggcgcaggacttcgcgaaagccatccgcatgacgtacagattacaaaagaatcacctaactatacaatttcataataaattgttacaaattaaaaacatttgacagggtctctgactctgtctattttttttatactgattatgataaaatttatactgttgtgcattgaaaatgtccttaacggcttaattatagatgaagaaaatgaaatacggaggtcgtacgattgaacatcaagaaatgtaaacagctactgatgtcattggttgtgttaactctagctgtcacgtgtctggctccaatgtcaaaagcaaaagcagccagcgatccaattgatatcaatgcatctgctgctattatgatcgaagcttcttcaggtaaaattctttacagtaaaaatgcagataagagactgccaattgcgagtatgacaaaaatgatgacagagtatctgttattagaagcaattgatcaaggtaaagtgaaatgggaccaaacctatacgcctgatgactatgtgtatgaaatttcccaagataacagcttatcaaacgttcctcttcggaaagacgggaaatacacagtaaaagaattatatcaagctacagcaatttattctgcaaatgctgctgctattgcaattgcagaaatcgttgccggttctgaaactaagtttgttgaaaaaatgaatgcaaaagcaaaagaactaggcttaacagattacaaatttgttaacgcaacaggtcttgaaaacaaagatcttcacgggcatcagcctgaggggacaagcgtaaatgaagaaagtgaagtttctgcaaaggatatggcaattcttgcggatcacttgattactgactaccctgagatactggagacttccagtatcgccaaaacgaaattcagagaaggcaccgatgatgaaatggacatgccgaactggaattttatgctgaaggggcttgtcagcgagtataaaaaagcgactgtagacggactgaaaacaggttctactgactctgcgggttcatgctttacaggaacagctgaacgcaacggtatgcgtgtcatcactgttgttttaaacgcgaagggcaaccttcatacaggccgtttcgatgaaacgaaaaaaatgtttgattatgctttcgacaatttctccatgaaagaaatttatgctgaaggcgatcaagtaaaaggccataaaacaatttcagttgataagggtaaagagaaagaagtaggcattgtgacaaacaaggcgttctctcttcctgtcaaaaatggtgaagaaaagaattacaaagcgaaggtcacactgaataaagacaacttaactgctcctgtgaaaaaaggaaccaaggttgggaagctgactgcggaatacacaggtgatgaaaaggattacggattccttaacagcgatctggctggcgtagaccttgttacaaaagaaaatgtagaaaaagcaaactggtttgttttgacaatgcgcagtatcggcggattttttgccggaatttggggaagcattgttgatacggtaaccggctggttttaatcaattgaaagagctctgatggatgttagggctctttcgcgtaatatactgaaaaaacccaatttttaataaaaaatgattttcaaagcgctaaaaaccgaataaaatagtatatatccatatgaattattggatttctaggatacaataaggattagaaatcatataactataccttgattagggggaccaagaaatggctcaaacaggtactgaacgtgtaaaacgcggaatggcagaaatgcaaaaaggcggcgtcatcatggacgtcatcaatgcggaacaagcgaaaatcgctgaagaagctggagctgtcgctgtaatggcgctagaacgtgtgccagcagatattcgcgcggctggaggagttgcccgtatggctgaccctacaatcgtggaagaagtaatgaatgcagtatctatcccggtaatggcaaaagcgcgtatcggacatattgttgaagcgcgtgtgcttgaagctatgggtgttgactatattgatgaaagtgaagttctgacgccggctgacgaagaatttcatttaaataaaaatgaatacacagttccttttgtctgtggctgccgtgatcttggtgaagcaacacgccgtattgcggaaggtgcttctatgcttcgcacaaaaggtgagcctggaacaggtaatattgttgaggctgttcgccatatgcgtaaagttaacgctcaagtgcgcaaagtagttgcgatgagtgaggatgaactaatgacagaagcgaaaaatctaggtgctccttacgagcttcttcttcaaattaaaaaagacggcaagcttcctgtcgttaactttgccgctggcggtgtagcaactccagctgatgctgctctcatgatgcagctcggtgctgacggagtatttgttggttctggtattttcaaatcagacaaccctgctaaatttgcgaaagcaattgtggaagcaacaactcactttactgattacaaattaatcgctgagttgtcaaaagagcttggtactgcaatgaaagggattgaaatctcaaacttacttccagaacagcgtatgcaagaacgcggctggtaagaacataggagcgctgctgacatgttaacaataggtgtactaggacttcaaggagcagttagagagcacatccatgcgattgaagcatgcggcgcggctggtcttgtcgtaaaacgtccggagcagctgaacgaagttgacgggttgattttgccgggcggtgagagcacgacgatgcgccgtttgatcgatacgtatcaattcatggagccgcttcgtgaattcgctgctcagggcaaaccgatgtttggaacatgtgccggattaattatattagcaaaagaaattgccggttcagataatcctcatttaggtcttctgaatgtggttgtagaacgtaattcatttggccggcaggttgacagctttgaagctgatttaacaattaaaggcttggacgagccttttactggggtattcatccgtgctccgcatattttagaagctggtgaaaatgttgaagttctatcggagcataatggtcgtattgtagccgcgaaacaggggcaattccttggctgctcattccatccggagctgacagaagatcaccgagtgacgcagctgtttgttgaaatggttgaggaatataagcaaaaggcacttgtataaaacagttgaaagctgtggaaacttatagtacattataagcacaaataaagatcgaaaagcgttgataggaactagtagggagcctctctttctaagagagccgatggttggtgcgaatcggtgaaagatgctgtctgaatccatccttgagcgaaatgctgaagcgagtaggcatttacgggataaccgttatgtttgaaagtggaaaacgagtctttgatttgttttcaatcagggtggcaacgcgagagctctcgtccctttatggggatgagggctctttttattttcgataaatcaataaaaaaaggagtgtttcgcatgcttgatacgaaaatgctgagagcaaattttcaagaaattaaagcaaagcttgtacacaaaggcgaagacttaactgattttgataagtttgaggcgctggatgatagacgaagagagcttatcggcaaggttgaagagttaaaaggaaaacgaaatgaagtttctcagcaggttgctgtgctgaagcgtgagaaaaaagacgcggatcacattattaaagcaatgcgtgaagtcggcgaggaaattaaaaagctcgatgaagaattacggacagtggaagctgagcttgatacaatcctgctctcaatcccgaatattccgcatgagtctgtacctgtcggtgaaacagaagacgacaacgtagaagtgcgtaaatggggtgaaaagccttcatttgcttatgagccgaagccgcactgggatattgcggatgagctgggtattctggattttgaacgtgctgccaaagtaacaggaagccgtttcgtgttctataaaggcttaggtgctcgtctggagcgtgcgctttataactttatgcttgatctgcatgtggatgagtataactacactgaagtgatcccgccatatatggtaaaccgcgcaagcatgacgggaacggggcagcttcctaaatttgaagaggatgcatttaaaatcagagaagaagattatttcttaattccaacggcggaagtgccgattacaaacatgcatcgcgatgaaatcctttcaggtgacagcctgccgatcaactatgcggcattcagtgcttgcttccgttctgaagctggttcagcaggacgtgacacacgcggattaattcgtcagcaccaatttaataaagttgagcttgtaaagtttgtgaagcctgaagattcttatgaagaattagagaaacttacaaaccaagcagaacgggttcttcagctgcttgagcttccataccgtgtcatgagcatgtgtacgggtgacttaggctttacggctgcgaaaaaatacgatatcgaagtttggattccaagccaagacacatatcgagaaatctcttcttgcagcaacttcgaagcgttccaggcgagacgtgcgaatattcgtttcagacgtgaagctaaaggcaagcctgagcatgtacacacactgaacggttcaggactggcggttggaagaacagttgccgctatcttagaaaattatcagcaggaagacggaagcgttgtgattccgaaagtgctccgtccttatatggggaatagagaagtaatgaaaccgtaaattatggaaaggcgtgcctgacaaggtgcgcctttttgcttatgtaaacacggcattttcataaaaacaaaaaaagtttttaaaaatgcttgaccacacgagaacatacgtgatatagtaagtcttgtcgatacggaggaatacccaagtccggctgaagggatcggtcttgaaaaccgacaggggtgtcaaagcccgcgggggttcgaatccctcttcctccgccatattgattttaattctaatgaaacacaagcatatattggagattgttttgtccgttgcattcggtgcggcggattttttattttaaagaaaaagtgaatctcgactgagattcactttttttgattatcatgaataactgaagcaatttgatctacaatattttcaatcgagttttcgtcgttcagaagatcataatcttcaatgcgaagttttaaaacagggcaggcattaaaaccgcttatccagttctcgtagcgtgtatgcatttcttcccaataagacctgcttgtctgaagctccatctcacggccgcgttgttcaatccggtttaaaatgttctccagatctccttctaaatagatcagcacatctgggtgtgggaaatacggtgtcattaccattgcttcgaaaaggcttgtgtaagtcttataatcaacctttgacattgtccctttatcagcatgcatttttgcgaaaattcctgtatcttcataaatcgaacgatcctgtacaaaacctccgccggcttcaaaaattgttttctgttctttgaagcgttcagctaagaagtaaatttgaaggtgaaagctccaacgttcaaaatcatgatagaacttttccaagtatggattatgatcgacttcctccaaagatgttttaaatccaagccgtttagctaaagtttttgttaaagtcgattttccgacacctactgttcctgctactgtaataattgaattcttagggatatgatgttccttcatacgataagctcctttacatgggcggcaatgcgttcaaagtcgctcttattcaaaacgaaatcctttgaatcaccatctacggttaacactgtaagttcagggtctgcttcctgcagctgcttgatggcgacttcataatctgaaatcagctgctccaaatagctagtttcaatttttttctcaaaggggcgcccgcgtttttcaatgcggtgtagcaatgtaggcagactggcctttatgtaaatgatgaaattcggctttggcagatcatccgttagcaggtgatatatctttttgtatttttccagctgatgtggagacaaggtgcgttccgcaaaaatcacatttttataaatatgataatcagctattacaggctgtcccttttttaaaaagtgatcactggtgtcttcaagctgtttgtatctgtgacaaagaaaaaacatctcgagctggaagctccattcctctatattgtcataaaacttatcaaggtacgggttatcctctacaatctcattgatcatagggaatccgaattcttgtgagagcatcgttgcgagagttgtttttcctgccccgataggaccttctattgcaataaaaggggctgtattcatcggaatcctccttatatctgaaaaacgtgcgtcagttaccgaccttcatattgtatcacaacccttgggtgcccccatgaaaaaagacgtttccaaattatcgaaacgtctttttgacaacattaaattgatcagacagcagcagccagttttgtggaaaggaaagacccagcttccaatagctgatgcctcttaaattcagctctttaatcagattaaattttgcttgaatcgagcgggcatcctcgaaccatacctcgtgccttctgttttctgcatcagtatagcggaagaaaggagcttgagcggtttggtcatactgaatggaagcattgttctgatcagctatgacaatggcttgctgagggcttactgctcttgctggagttccccctgctgtatatggcagcgtccagtcatatccatataaattctggcccatgacaattttgttcgcaggcatttcagtcaaagcatattctatgacatcacggacaggtccaattggagaaaccgcttgaggcggcccgccgctatagccccattcatatgtcatgagaacaacaaagtcgacaatttggccatgcgccctgtaatcatgagcttcataccatctgccctgctgtgttgcacttgttttaggagcaagtgccgtagaaatttctaagccctctcgatgaaaaagatcccttgcttcgcggagaaattgattataggcctctctatcctggggccgcaaatattcaaagtcgaaatgaatgtcacggaagccatatctcttggcattctccactatttcatttagaagccttctttttacagtttcgtcgttcaaaaggatccggccaagttcatcactaaatgcctggttttctaggttcgttataatcatcatcaatgttgtattttgactttctgtaatgctccttaaattcgttaaaggcggtgcgactaaggttccgttccgctgtgcctggaagctgaatgcgccaaggtacgttaagtagggcgacgcttctctggccgcctgctggagattttcgctgacttgatttcctcggggctccaaataagcatttgattcgatgtctcgtttaggggctggtgggatgtatatacggaaaccaatctgaagcacggtatttaactggatgcggttaacccttgcgagctcggctgctgttgtattgaactgccgggcgatggatgtcagggtatcacctcgcttcacatcatagaactggccggctattggaatgacaatggtttgtccgacaacaaggctgtcgggattcggtatttcattcgtttcagtgatctcatttgcggttgttctgtattgtgaagcgatagcagaaagagtgtcgccttgttttaccacataaatttgaatgaaaaacgcctcctttcatatcgctatcaatgtatgaaagaaaagcgctgatcatgtttatttttctgtaatttgttcttccgtcgtaatttctgcgaaaagaacattctccatcatagttaaggcgaattcgttatcttcgtcactgtttgacgcgatacagtccttaggaatcgtgatgctgtattccctcatataagcgtcattagcggtaaacagcacacatatattgccggctatacctgttaagataatatgtctcacctgcaactcagtaagaagggtgtgaagtgcagtttcgtagaaagcggaatgttttggtttgattaaaaaataatcagcatcttccggggctatcttagtgatgatatccttgcttctttcatttgtgcattcttgctgaatgtttttaatgtcagcttgccaaagtccataatgatcattgatgtaaataatcggccattcattttgtctcgcgtgctcctttaatgataaaatatgaggaacgattttttctgtttttttagcgagggtttctcccatatcgaattcaaaattattgatcatgtctacaatgagaagggctgtatctgctttggacaatcgacagtctcctttccgtttcagttatagttaatatgtagcctttttaggcaatgaaaaaactttgaaaagagagcttatccttatgacacaagatgaactttatatgaaagaagcaattaaagaagcgaaaaaggctgaagagaaaggtgaagtgccaataggtgcggtgcttgtcgttaatgatgaaattatagcgcgtgcacataatttaagagagactgagcaacgatctattgcccatgcagaaatgcttgtgattgatgaagcgtgtaaggcactgggaacatggcggctggaaggtgcgactctttatgtgacgcttgagccttgtccaatgtgtgctggtgcagtcgtactttctcgagtggaaaaagtggtttttggcgcatttgatccgaaaggcggctgttcaggcacgctaatgaaccttctccaggaggaacgctttaatcatcaggctgaagtggtgagcggtgtacttgaggaagaatgcggcggaatgctcagtgcgtttttcagagaactaagaaaaaagaagaaagctgccaggaaaaacttgtctgaatagtacggttgcaatttttaggggaaacagatatacttaagtgtgcatcgtaatagatgcaacataaaatttgatatttattttgccgtgctaagcggggaggtagcggtgccctgtacctgcaatccgctctagcagggccgaatcccttctcgaggttcgtttactttaaggcctgccttaagtaagtggtgttgacgtttgggtcctgcgcaatgggaattcatgaaccatgtcaggtccggaaggaagcagcattaagtgaaacctctcatgtgccgcagggttgcctgggccgagctaactgcttaagtaacgcttagggtagcgaatcgacagaaggtgcacggtaaatcaatcatcaaattttcagactcacctaatattaggtgagttttttgttatgtaaaaagagcttttggaatcgaaacaaggttcatgtataatgggaatgatgaataacggaggagggcaaacccgtgagttaccaagctttatatcgagtattcaggcctcagcgctttgaagatgtggtcggacaagaacacattacaaaaacgctgcaaaatgcccttttgcaaaaaaagttttctcacgcctatctgttttccgggccaagaggaaccggaaaaaccagtgcagccaaaatatttgctaaggctgtcaactgtgaacatgctcctgttgatgagccatgcaacgaatgtgcggcctgtaaagggataacaaacgggtcaatatccgatgtcatagaaattgacgccgcttctaataacggtgttgatgagattcgtgacattcgcgataaagtgaagtttgccccgtcggccgtcacatataaggtatatatcatagatgaggtgcatatgctttctatcggcgcttttaatgcattactaaaaacattagaagagccgcctgagcattgtattttcatattagcaacaactgaaccacacaaaattcctttaaccattatctctagatgtcagcgttttgactttaaacgaattacctcccaggcgattgtaggccgcatgaataaaattgttgatgctgaacagctgcaagtggaggaaggatcgctggatatcatcgcgagtgctgcagacggagggatgagggatgccctgagccttcttgatcaggccatatcattcagcggcgatatcctgaaagtcgaagatgcgcttttaattacgggtgctgtttctcaattatatatcgggaagcttgcacaatccctgcatgataaaaacgtttctgacgcactggaaacattaaatgaattgcttcagcaaggaaaagatccagctaagctgatagaagatatgattttctatttcagggacatgctgctgtacaaaacagcccctggcttagagggagttcttgagaaagtaaaagttgatgaaacgttccgggaactaagtgaacaaattccggctcaggccctatatgaaatgattgatattctgaacaagagccatcaggaaatgaaatggacaaatcatccgcgtatctttttcgaagtggccgttgtgaagatttgccaaacctcacatcaatctgctgctgatctcccggaagtggatatgctgatgaaaaaaatccagcagctcgaacaggaagtagagcggctcaaaacaacgggcataaaagcagctgcggaaagcccgaaaaaagaagcgccgcgtgtgccaaagggcgggaaatccaattacaaagcgccagtaggcagaattcatgagattttgaaggaagccacaagaccggatcttgatctgctcagaaacagttggggcaagcttcttgctcatctcaaacagcaaaacaaagtatcacatgccgctttactgaatgacagtgaacctgtggctgccggatcggcggcatttgttctgaaattcaaatatgaaattcattgtaaaatggtcgctgaggataacaacggagtccggactaatcttgagcagattttagaatcgatgctcggaaaaagaatggatttgattggcgttccagaagcacaatggggtaaaataagagaagaatttttagaagatcatcagcaggaaaatgaaggatcaaatgaaccggctgaagaagacccgcttattgccgaagcgaaaaagcttgttggagcggatttaattgaaataaaagactaacaaaatgaaagagagtgaatgctatgcgtggcggaatgggtaatatgcaaaaaatgatgaaacaaatgcaaaaaatgcaaaaggacatggcgaaggctcaagaagagcttgcagaaaaggttgttgaaggaactgcaggcggcggtatggtaacagtaaaagcaaacggccaaaaagaaatcctggatgttatcatcaaagaagaagtcgttgatcctgaagatattgatatgcttcaagatttagtgcttgctgcaacgaatgaagctttgaaaaaagttgacgaaatcacaaacgaaacaatgggtcaatttacaaagggaatgaacatgccaggtttattctagggggataaaagaacatgcaatatcctgaaccaatatcaaagctgattgacagctttatgaaattgccagggatcggaccgaaaacagcggttcgtctggctttttttgttctaggtatgaaagaagatgtagtattagattttgcgaaagcattagtaaatgcgaaacgcaacctgacatattgttcagtttgcgggcatattacagatcaggacccttgctatatatgtgaagatacgcgcagggataagtctgttatctgtgttgtgcaagaccctaaggatgttatcgctatggagaaaatgaaggaatacaacggacagtatcacgttcttcacggcgctatttctccaatggacggcatcggaccggaggatattaaaataccagaattgttaaaacgattacaggatgatcaagtgacagaagtgatcctcgcgacaaaccctaatatagaaggggaagcaacggcgatgtatatatcaaggctcctcaagccgtctggtattaagctctcccgtattgcccacggactgcccgtcggcggtgacttggaatatgctgacgaggtcactctttctaaagcacttgaaggaagacgtgaattgtaaggaggaaaaagcgatccatgggttttcttcgcaagaaaacattaagaagagagtttgatgaaaaactaaccgagcagctttttaagcaaaaggaagagtggaacaggcaaaaaaagctggtcgaaaaaagcttagaaccgtctgctgaagtgttatacgaactgaaagtagctgaagcgaagtattttttttacttaagggaagcgaagcagcgaaatttaaaaatcagccggtggaagtaagtggtctaaactcctggatcttctcataagcttgtactagaacaagcgaaggagatgagaagattcatggagcctatttttattattgggattattttaggactggttattcttctttttttatcaggttcaactgcgaagcctttaaagtggatgggcatcacagctgttaaatttgtggcaggtgctttgctgctggtttgtgtaaatatgtttggcggcagtcttggcattcatgtgccgattaatctggttacaacagctatcagcggaattttagggatacccggaatagctgcgttagtcgttattaagcaatttatcatttaattgatattatgtattgacttagacaactgaaggtgttattctaatatacgtcgctgatgacgaacagcttttttgaaaaggaaatgctaaaaagttgttgacagtagcggcggtaaatgttatgataataaagtcgcttaaacgagcggtaaacaaagttctttgaaaactaaacaagacaaaatgtacctgttaattcatttttataaatcgcacagcgatgtgcgtagtcagtcaaactactttatcggagagtttgatcctggctcaggacgaacgctggcggcgtgcctaatacatgcaagtcgagcggacagatgggagcttgctccctgatgttagcggcggacgggtgagtaacacgtgggtaacctgcctgtaagactgggataactccgggaaaccggggctaataccggatggttgtttgaaccgcatggttcaaacataaaaggtggcttcggctaccacttacagatggacccgcggcgcattagctagttggtgaggtaacggctcaccaaggcaacgatgcgtagccgacctgagagggtgatcggccacactgggactgagacacggcccagactcctacgggaggcagcagtagggaatcttccgcaatggacgaaagtctgacggagcaacgccgcgtgagtgatgaaggttttcggatcgtaaagctctgttgttagggaagaacaagtaccgttcgaatagggcggtaccttgacggtacctaaccagaaagccacggctaactacgtgccagcagccgcggtaatacgtaggtggcaagcgttgtccggaattattgggcgtaaagggctcgcaggcggtttcttaagtctgatgtgaaagcccccggctcaaccggggagggtcattggaaactggggaacttgagtgcagaagaggagagtggaattccacgtgtagcggtgaaatgcgtagagatgtggaggaacaccagtggcgaaggcgactctctggtctgtaactgacgctgaggagcgaaagcgtggggagcgaacaggattagataccctggtagtccacgccgtaaacgatgagtgctaagtgttagggggtttccgccccttagtgctgcagctaacgcattaagcactccgcctggggagtacggtcgcaagactgaaactcaaaggaattgacgggggcccgcacaagcggtggagcatgtggtttaattcgaagcaacgcgaagaaccttaccaggtcttgacatcctctgacaatcctagagataggacgtccccttcgggggcagagtgacaggtggtgcatggttgtcgtcagctcgtgtcgtgagatgttgggttaagtcccgcaacgagcgcaacccttgatcttagttgccagcattcagttgggcactctaaggtgactgccggtgacaaaccggaggaaggtggggatgacgtcaaatcatcatgccccttatgacctgggctacacacgtgctacaatggacagaacaaagggcagcgaaaccgcgaggttaagccaatcccacaaatctgttctcagttcggatcgcagtctgcaactcgactgcgtgaagctggaatcgctagtaatcgcggatcagcatgccgcggtgaatacgttcccgggccttgtacacaccgcccgtcacaccacgagagtttgtaacacccgaagtcggtgaggtaaccttttaggagccagccgccgaaggtgggacagatgattggggtgaagtcgtaacaaggtagccgtatcggaaggtgcggctggatcacctcctttctaaggatattatacggaatataagaccttggctcttataaacagaacgttccctgtcttgtttagttttgaaggaactttgttccttgaataagttaagatgggcctgtagctcagctggttagagcgcacgcctgataagcgtgaggtcggtggttcgagtccactcaggcccaccatcttatataacggggccttagctcagctgggagagcgcctgctttgcacgcaggaggtcagcggttcgatcccgctaggctccaccaacgtgttctttgaaaactagataacagtagacatcacattcaattagtaacacaagatatcacatagtgattctttttaacggttaagttagaaagggcgcacggtggatgccttggcactaggagccgatgaaggacgggacgaacaccgatatgcttcggggagctgtaagcaagctttgatccggagatttccgaatggggaaacccaccactcgtaatggagtggtatccatatctgaattcataggatatgagaaggcagacccggggaactgaaacatctaagtacccggaggaagagaaagcaaatgcgattccctgagtagcggcgagcgaaacgggattagcccaaaccaagaggcttgcctcttggggttgtaggacactctatacggagttacaaaagaacgaggtagatgaagaggtctggaaaggcccgccataggaggtaacagccctgtagtcaaaacttcgttctctcctgagtggatcctgagtacggcggaacacgtgaaattccgtcggaatccgggaggaccatctcccaaggctaaatactccctagtgaccgatagtgaaccagtaccgtgagggaaaggtgaaaagcaccccggaaggggagtgaaagagatcctgaaaccgtgtgcctacaagtagtcagagcccgttaacgggtgatggcgtgccttttgtagaatgaaccggcgagttacgatcccgtgcaaggttaagcagaagatgcggagccgcagcgaaagcgagtctgaatagggcgcatgagtacgtggtcgtagacccgaaaccaggtgatctacccatgtccagggtgaagttcaggtaacactgaatggaggcccgaacccacgcacgttgaaaagtgcggggatgaggtgtgggtaggggtgaaatgccaatcgaacctggagatagctggttctctccgaaatagctttagggctagcctcaaggtaagagtcttggaggtagagcactgattggactaggggcccctaccgggttaccgaattcagtcaaactccgaatgccaatgacttatccttgggagtcagactgcgagtgataagatccgtagtcgaaagggaaacagcccagaccgccagctaaggtcccaaagtatacgttaagtggaaaaggatgtggagttgcttagacaaccaggatgttggcttagaagcagccaccatttaaagagtgcgtaatagctcactggtcgagtgactctgcgccgaaaatgtaccggggctaaacgtatcaccgaagctgcggactgttcttcgaacagtggtaggagagcgttctaagggctgtgaagccagaccggaaggactggtggagcgcttagaagtgagaatgccggtatgagtagcgaaagaggggtgagaatcccctccaccgaatgcctaaggtttcctgaggaaggctcgtccgctcagggttagtcgggacctaagccgaggccgaaaggcgtaggcgatggacaacaggttgatattcctgtaccacctcctcaccatttgagcaatggggggacgcaggaggatagggtaagcgcggtattggatatccgcgtccaagcagttaggctgggaaataggcaaatccgtttcccataaggctgagctgtgatggcgagcgaaatatagtagcgaagttcctgattccacactgccaagaaaagcctctagcgaggtgagaggtgcccgtaccgcaaaccgacacaggtaggcgaggagagaatcctaaggtgatcgagagaactctcgttaaggaactcggcaaaatgaccccgtaacttcgggagaaggggtgctctgttagggtgcaagcccgagagagccgcagtgaataggcccaggcgactgtttagcaaaaacacaggtctctgcgaagccgtaaggcgaagtataggggctgacgcctgcccggtgctggaaggttaagaggagcgcttagcgtaagcgaaggtgcgaattgaagccccagtaaacggcggccgtaactataacggtcctaaggtagcgaaattccttgtcgggtaagttccgacccgcacgaaaggcgcaacgatctgggcactgtctcaacgagagactcggtgaaattatagtacctgtgaagatgcaggttacccgcgacaggacggaaagaccccgtggagctttactgcagcctgatattgaatgttggtacagcttgtacaggataggtaggagccttggaaaccggagcgccagcttcggtggaggcatcggtgggatactaccctggctgtattgaccttctaacccgccgcccttatcgggcggggagacagtgtcaggtgggcagtttgactggggcggtcgcctcctaaaaggtaacggaggcgcccaaaggttccctcagaatggttggaaatcattcgcagagtgtaaaggcacaagggagcttgactgcgagacctacaagtcgagcagggacgaaagtcgggcttagtgatccggtggttccgcatggaagggccatcgctcaacggataaaagctaccccggggataacaggcttatctcccccaagagtccacatcgacggggaggtttggcacctcgatgtcggctcatcgcatcctggggctgtagtcggtcccaagggttgggctgttcgcccattaaagcggtacgcgagctgggttcagaacgtcgtgagacagttcggtccctatccgtcgcgggcgcaggaaatttgagaggagctgtccttagtacgagaggaccgggatggacgcaccgctggtgtaccagttgttctgccaagggcatcgctgggtagctatgtgcggacgggataagtgctgaaagcatctaagcatgaagcccccctcaagatgagatttcccattccgcaaggaagtaagatccctgaaagatgatcaggttgataggtctgaggtggaagtgtggcgacacatggagctgacagatactaatcgatcgaggacttaaccacattttgaatgatgtcacacctgttatctagttttgagagaacactctcaatttgtttggtggcgatagcgaagaggtcacacccgttcccataccgaacacggaagttaagctcttcagcgccgatggtagtcgggggtttccccctgtgagagtaggacgccgccaagcaagtttaaacccagctcattgagctgggttttttgtttacttaagatcgagaaaatcaaacaaatacaaacaccgagggcttatatagcccatatactgatttaaagtttcaaaaaggtctaaatagtgtatacaatatccgttttaaggggaggctaactgtacggaggtggagaagatggacgaaacagttaaacttaatcatacatgtgtgatttgtgatcaagagaagaatagaggcattcatctttatacgaaattcatatgcttagattgtgagagaaaagtaatttctacatcaacttctgatcctgactatgcgttttacgtaaaaaaactaaagagcattcatacaccgccattatattcatagacctgaaaaggtctttttttgtactcttaataataaaaagaagatgaaacttgtttaaggattgaacgtagtagataataatattaaaactgagtatagacacaggagtcgattatctcatgcagagattttttcactttttgatgtggagtttaactagcagtgcgacttttgttttcattggaatattgagcttttttggtttaaaccagtcgctttttttatctattgtttatgggcttgcttctggagcagccgtatatatagctggcatctggaatgcaagacggttatttcttaaaaagcatgaattgacaggaagagagtatgcttacattaagaaaaacttagaggaagcaaggcagaaaatgatccgtcttaggaaagccttgtttcaggctaaaagcattcaaatgtttaagcaaaatgcagaaatgctaaggattgtgagaaggatttatctcctcaccaaaaaagagccaaagcggttttatcaggcagaacgatttttttatcaaactctcgattcggttgttgaattaacagagaagtatgcttttctatcatctcaccccaaaaaaagcaaagaactttcgatgtcgttaagtgagacacgcatcactcttactaaattgaccaagcgtttagaggaagatttaactcaagtaatgggtgatgaaattgacgagttgcactttgaattagacgcagcaaaacattcattaaagaaataagggaagagggtaagagcgatgaaccgagaccaaagcgaccttcatatagatgaattattggcagatccttttggtggtaacatagagataccaggttcggaggctgtaaaagcagagaaagagcaagtacggcttgttgatgttcttcctgaggaaaacaagaaaaaagcaattcagcttgctggacagattgatcataaaaatatgcaaagcattgtcttatacggttcacaagctcaatctaaactgctgaacttttctcatgatatgattaatcatgttcaaaagaaggatgtcggggaaattggcgaaatacttggagagctgatgaaaaagctggagcaagtaaatcctgatgatctccaatctaagaaaaagggttttttggcacgcatgtttggaagagtatcaagttctcttcaagaggtgctgtctaaataccaaaagaccagtgtgcagatagacaaaatcagcttgaagctggagcactctaaaaatgctttaattagtgacaacaagctgttagagcagttatatgaaaaaaataaagaatattttgccgcgctgaatgtttatattgctgcaggagaactgaagctggaggaattaaaaacaaaaacgattcctgaactgaagcaacaggctgaatcgagtgatcataaccaaatggccgttcaagaggtgaatgatttaattcaatttgctgaccggttagataaaagggtgcatgatttgctgctgagcaggcaaattacaatccaaagtgcaccgcaaatcaggctgattcaaaacacaaaccaagcgttagcagaaaagattcagtcatccattgtgacagcgattccgctatggaaaaatcaagttgccattgcactgacgcttttaaggcagcgcaatgcagtggatgcacaacagaaagtatctgatacaaccaatgagcttttgctgaaaaatgcggagcttttaaaaaccaatacaattgaaactgtacgagcaaatgaacgaggccttgttgatatagataccttaaaaaaggtgcaggaaagcttaataagcacgcttgaagaaacactgactatacaagaagaaggacgaatcaaacgccgtcaggcagaagaagagctgatgatgatggaaggcgacctaaagcaaaagctgcttacaataaaggaaagatagttaccagtaagtctggctttaagttctgtcagaggcacgatataataaggtgtaagaagacacattcaaaggattgttttcatgaacacacctttatataaagcattaattcaacatgcgagaagaaattctcattcatttcatgttccgggacatcacaatggagatgtcttttttgatgacgctaagtcaatattcaatccgcttctcaccattgatgtaactgaactggcaggactggatgatctccatcatccttctggggtgattaaggaagctcaggagcttgccagtcaattatatggatcggcggaaagtttttttctggtaaatggtacgactgtcggaaacttagcgatgattttatctgtttgtgaacctggtgatacaattctggttcaaagaaactgtcataaatctgtatttcatgctgttgatttgtccggtgctgagccggtttatcttgcacctgacgttgattcagcgatgcatgtgcctacgcatgttccgcttggaacaattaaagaggccctggaagcatatccagatgcgaaaggcttggtactgaccaatccgacatattacggacatagtgctgatttgactgagatcattactgaagcccatcattacgggattcctgttttggtcgatgaagcgcatggcgcacattttattttaggtgagccttttccggtctcagctttaaaaatgggggcagatattgttgttcagtcggcccacaaaacgttgcctgccatgacgatgggttcttatttgcatctcaacagcagctgcaggattaacagggatcgggtggcagagtatttaaaccgattacaaagcagcagcccgtcttatccgattatggcttcgttagatattgcccgcgcttatgtacagcatattatagaagaacaaaagctttctgacattctgcagcggatagaaacacttaaacaaacgtttgattcacttacaaatgcagaagctgttaaccctgctaatccactgatcatcacggatccgctaaagctcacaattcgttcaaaacgcggacattctggctatacgctgcaaagcatattagagcgtgccaacatattcactgagcttgctgatgaaaatcaagtactgctcgttctcccattgggaggaaaacggagaataaatgctgaaaccattagaagcattgatgaagagattgagaaaacgcctccggatcaggcgtttgtttctgcagaatggggagtgcagcctgttactgtcttgccttatccaaaaaaggtcttacattcgtttaagaaagaatatgtggactttgaggaagcagctggccggctgaatgcagaagatatcatcccttatcctccgggtatcccgatgattatggcgggagaaagaataacaaaagaaagtgtgcaaaagctcagccgcttgatcagcatgaaaacgcatgttcaagggaatatgaaaatcaaagagaaacaactacttgtttatatagaagaggagaaatcatgagcggtttatttattacattcgaaggtcctgaaggtgcagggaaaacgactgttctgcaggagatcaaaaacatactgacagcagaaggccttcaggttatggcaactcgagagccaggcggaatagatattgcagaacaaattcgagaggttattctgaatgagaacaatatattaatggacccaaaaacagaagctctcttatatgcggctgcaagacgccagcatttagttgaaaaagtaaaacctgctttagaacagggggttatcgttctttgcgacagattcatagacagttctcttgcgtatcaaggatatgcaagagggcttggaattgatgaggttctgtccattaatgaatttgccattggagatatgatgccccatgtaacggtttatttttcaattgatccggaagaaggactgaagcgtatttacgcaaacggctcacgggagaaaaacaggctcgatttagaaaaactggactttcatacaaaagtacaagaaggttatcaagagctgatgaagcgatttccggaaagatttcattcagttgatgccgggcaatccaaagacctcgtcgttcaggatgttctaaaggtgatcgatgaagcgttgaaaaaaattcaattgtgacctgtttcccaatagttgatataataatgtaaacgagatcacgttgtttccaatctaaaggaggccttcacagatgaaattgatagtggcagttgtacaagatcaggacagcaacagacttttgaaaaccttaacggatcacaacttcagagtcacaaagcttgcgacgacaggaggatttcttaaatcaggcaatacaacgtttatgatcggtgtcgaggatatacgcgtcaataaagcgttgagtctcattaaagaaaacgggcagaaacgtgatcagatgattgcccctgtatctccaatgggtggaaatgctgattcctatgtcccttatccagtcgaagttgaagttggcggagcgacagtatttgtccttccagtcgatgaatttcatcaattttaaggatctgaaactgtgaaaattaataaagatatacgtacatttatagataataagcagattccctctgtgaaaacatctgagatcacggcatcgtttaaaacatcaatggaaaaccaaagcagcaaaatgaagcttgatcagcttaccaggttgttatctgatatagaagcattcggaaaaaggctaacgaaatctcggaattttaaagacttagcgagatttaaaggacttgtgaaacgttttgtcaaggaagctgtggacagcggcctttcacatgaaacatcgaaaagctttgacctttacgggaacagcagaacgctgggacttgtgaaagaaatagatgacaaattgatacagcttacggaagagatgatggatcaggaaaaaccggcaattgatttgctggagcgtattggcgaaataaaaggtttattaattaacctttacacatagagagtgatacaatggcaatatcctggaaggaaatgaacgagcttcagcccagagtgatgaagcttttatataatagtattgagaaggacagactatcacacgcttatttgtttgagggaaaaaaaggaacaggcaagcttgatgccgcgctgcttcttgcaaaaagcttcttttgtctggaggatggcgcggagccttgtgagagctgccgaaactgtaaacggatagagtcagggaaccatcctgatctccatcttgttcagcctgatggcttatcaatcaaaaaggcgcaaattcaagcgctccaagaagagttttctaagacaggacttgaatcgcataaaaagctgtatattatttcgcacgcagatcaaatgacagcaaatgcggcgaacagcctgctgaaatttttagaagaacctaacaaagacacaatggccgtcctcatcactgagcagccccaaaggttattggataccatcatttcaagatgccaaacccttccttttcagcctttgcagccgaaagcaattgaagatagactgatcgaacaggacgtctcgcctcatatggcaaggcttctagccaacatgaccaataatgtagcagaagcagtcgaattaagtcgaaatgatgagtttgcagagtctagagcgaaagtgataaaattgtatgaagtcctacaccagcggaaaggacatgcttttttctttattcaagatcaatggatgccctttttcaaagaaaaaacccatcaagaaatgggtcttgatatgctcttattgatatatcgtgatgtgttgtccatccaaataggaaatgaagataaattgatttatcaagacttattccaatcaataaaacagcatgcgctacaatcaacacaacaaagcgttacgaatcagatacttgctgttttagaagcaaagaaacggcttcattccaatgtgaatgtacaaggattaatggagcacttggtgttaatgttgcaggagggataagcttgtacaatgtaattggtgtccgctttaagaaagcgggtaaaatatattattttgatccgaatggatttcatatagaacatgacagctgcgtaattgtagaaactgtcagaggcgttgagtacggccaggtcgtaattgcaaataaacaggtggatgagcatgatgtggtgcttccccttcgaaaagtgatacgtgtggctgacgagcgcgatcttctcattgtagaagaaaataaacaggaagcactatcagcatttgatatctgccaaaagaaagtgattgagcatggcttggatatgaagctggtcgatgttgaattcacgtttgatcgcaataaagtcattttttacttcactgctgacggccgagtcgactttagagagcttgtaaaggatttggcttctatctttaagacaagaattgagctgcgccaaatcggagtgagggatgaggcaaaaatgctcgggggaatcggtccttgcggaagaatgctttgctgttcaacgtttcttggagattttgaacctgtttccattaaaatggccaaggatcagaacttgtctttaaatcctacgaagatttcgggtctttgcggacgattgatgtgctgtctaaaatatgagaacgatgagtatgagacggcaaaagaacagcttccggatataggagaaatgattacgacagcaaacggtcccgcgaaggtcgtcggactaaatattctggaacgggtgcttcaggtggaactgataaaccgtgaaaaagtgatagaatatacttgggaagagctcttggaagagggcgtcgtatccgcacaaaccacagattaacgaggtgtggaaccttggataaaaaagagttatttgatacagtcattaacttagaagaacaaattggctcactgtacaggcagctgggggatttgaagcagcatatcggtgagatgattgaggaaaatcatcatttacagcttgaaaacaagcatttgcgcaaacggctggacgatacgacgcagcagattgaaaagttcaaagctgataaaaaagaatcaaaaacacagaagacagagcaaactgatataggggaaggatatgataatctggcacgtctgtatcaagaaggatttcatatctgcaatgtccactatggtagtgttcgaaaagaagattgtcttttctgtctgtcattcttaaataaaaaatagggaaaaggcttccgcataagacgggagcctttttcaaaggtactgaaaggataagaagatggtttcattacatgatgatgaaagattagattatttgctggcagaggacatgaaaatcatacaaagcccaacagtgtttgctttttcgttggacgctgtgcttctgtccaaatttgcgtacgttccgattcaaaaagggaaaatcgttgatttatgcaccggcaatggtattgtgccgctgctgctcagtacaagatcaaaagcagacattctgggagtcgaaatacaagaaaggctgcatgatatggctgttcgcagcgtggagtataataagttggacgatcagattcagatcatacatgatgacctgaaaaacatgccggagaaacttggacataatcgatatgatgttgtcacctgcaatccgccgtattttaaaacaccgaaacaaactgaacaaaacatgaatgagcatctccgaatcgcaagacatgaaatccactgcacactggaggatgtcatttcagtcagcagcaagctgctcaagcaagggggaaaagcagctcttgttcaccggccgggaaggcttctggagatttttgaactgatgaaggcttatcaaatcgagccaaaacgtgtacaatttgtctatccgaagcaagggaaagaagccaataccattttggttgaaggtatcaaaggcgggcgcccggatttaaaaattcttcctcccttattcgtttatgatgaacaaaatgaatatacaaaagaaatcaggaccattttatatggagacaaataaccatttcttctacgtcgtgaaatgtaaggacaatagctggtatgccggatataccaacgatctgcataaacgagtgaaaacgcacaatgatggaaagggcgcaaagtacacaaaagtaagacgtccggttgaattaatttttgccgagagcttttcaacaaagcgggaagctatgcaggcggaatattatttcaaaaaactaactcggaagaaaaaagagctttatatagaagaaaagcggaacagcaaggaggctgtatatgttaaggcgccaaatgagctttaatggaaagtcggacatggggattctttacttggtcccaaccccaatcggaaatctagaggatatgacattccgggcgatcgacacgctgaaatcggtggatgcgattgctgcggaagatacgaggcaaacgaaaaagctttgtcatgtatatgaaattgaaacaccgctcgtcagctatcacgaacacaataaagaaagcagtgggcacaaaattattgaatggctgaagtcgggaaaaaacattgctcttgtcagtgatgccggtctgccgacgatttctgatcccggagcggaaattgtaaaggattttacggatataggcggttatgttgttccgttgccgggagcaaatgccgcattaacagctcttattgcttcaggtattgtaccgcagccttttttcttttacggttttctcaacagacagaaaaaagaaaagaagaaggagcttgaagcccttaaaaaacggcgggaaacgatcattttttatgaagcgcctcacagattgaaggaaaccttgtcagcgatggcagagatattaggagatcgggaaattgctgtaacgcgtgaactcactaagaaatatgaagagtttatccgaggaaccatatctgaggtcattggatgggcaaacgaagatcagatacgcggcgagttttgtcttgtcgtagaaggaagtaataatgaagaggtagatgaggaagaacaatggtgggaaaccctcactgcgaaagaacatgtcgagcattacatctcgaaaggcgctacgtctaaagaagccattaaaaaagcagcagtcgatcgcaatgtaccaaagcgtgaagtgtacgatgcttaccatattaagcaataaaaaaacgttcttgtgtcataacaagaacgttttttgtacaagaaatgattatttaaggttttgaagctggttttggatttcgctgatgatttgctcagcgccttctttactaagaaccaatttaccgcctgcaagtttaaggttatcatcagaaacttcaccagttacttggcaagtcatgtttggtttatattttttaaggatgattttttcatcatcaacatagatttcaagagcatctttttctgcgattccaagagtacgacgcagttcgataggaataactacacgtcctaattcatcaactttacgtacaataccagtagatttcataaacattctcctcccaagagatacttatttgtttaaattatatttttcttcgtcattattcgacaaaatccttaccttcatagcataacaaggtttccaataatcgtcaatcattttgtttactattgattgtaagaattagttcttatagtcagtaatgtcttagaaactaccgaaataacagcattttataaatatttaataaagctattatcctactaaaaatccttttaaatcaagactttcgaaccaaagttttttatttcatttgattatatacgacaaaattcgacacgaacagactttttttattttcattaaagatttttaattttaattattctttttcagggcgtatgtatatattcttgatcttaaaggctaagatggtatcatagataaaggataaatataaataatattcatatatgatttgcacttatcgccgctctcgtcctttgggcgggagctttttgacattctgattaggaggtttcaagatgccgcaagaaaacaatacattttacattacaacaccgatttattatccgagcggaaaattacatatcggccatgcatatacgacagtcgcgggagatgcaatggcacgttacaaaagattaaaagggttcgatgttcgctatttaacgggaacggacgagcatggacaaaagatccagcaaaaagctgaacaggaaaacattacacctcaggagtatgtggatcgcgcagcggcagatattcaaaaactgtggaagcagcttgaaatctcaaacgacgactttatccgcacgacagaaaaacggcataaagttgtcattgaaaaggtgtttcaaaagcttcttgataacggggacatctatcttgatgagtatgaaggctggtacagcatccctgatgaaacgttctacacggaaactcagctcgttgatattgagcggaatgaaaagggagaggtcatcggcgggaaaagccctgacagcggtcacccagttgaattgatcaaagaggaatcttatttcttccgcatggggaaatacgcggatcgtcttctgaaatactatgaagaaaacccgacattcattcagccagaatcacgcaaaaacgaaatgattaataactttatcaaacctggacttgaggatttggcagtatcacgtaccacttttgattggggcgtgaaggtgccggaaaatccaaagcatgttgtatatgtttggattgacgcactatttaactatttaacggcactcggttatgatacagaaaatgatgagctttatcaaaaatattggcctgccgatgttcatttagtcggtaaggagattgtacgattccatactatttactggccaattatgctgatggcgctggatcttccgctgccaaagcaagtattcgcgcatggctggcttttgatgaaagacggaaaaatgtcgaaatcaaaaggaaacgttgtagatccggttacattaattgagcgctatggtttagacgagcttcgctattacctgcttcgcgaagtgccgttcggatctgacggagtattcacgccggaaggatttgttgagcggattaactatgatttagcaaatgatttaggaaatctattgaatcgtactgttgcgatgattaataagtattttgacggacaaatcggttcttacaaaggtgctgttacggaatttgaccatacgctaacttctgttgctgaagaaacagtaaaagcttatgagaaagcaatggaaaatatggagttctcggtagcactttcgactttatggcagctcatcagccgcacaaacaaatacattgatgagacagctccatgggtgcttgcgaaagatccggcaaaagaagaagaattgcgatcagttatgtatcatctcgctgaatcattgcgtatttcagcggtactgcttcagccattcttaacaaaaacacctgaaaaaatgttcgagcagctgggcattactgatgaatctttaaaagcttgggacagcattacagctttcggccagctgaaagatacaaaagtacaaaaaggcgagccattgttccctcgtttagaggcagaagaagaaattgcttacatcaaagggaaaatgcaaggttcagcaccagcgaaagaagaaacaaaagaagaagagcctcaagaggtcgatcgtttacctgaaattacgattgatcaattcatggatgtagagcttcgcgtagctgaggtcattgaggcagaaccagtgaaaaaagcagaccgtttattgaagctgcagcttgatcttggttttgaaaagcgccaagtggtatccggcattgcgaagcattatacgcctgaagagcttgttggaaaaaaactcgtttgtgtaacaaatctaaaaccggttaaactcagaggagagctttctcaaggtatgatccttgcaggagaagcagacggcgttttaaaggtcgtgtctatcgatcagtcgttaccaaaaggcacaagaattaaataatgataaaacaaaaggtgtttcacgtgtaacaattcgtcgaacaccttttgtgtttcgacaagaaaggagtttttcacttatgttgtttgacacacacgcgcatttaaatgcagaacaatatgatactgatcttgaagaggttattgaacgggcaaaagctgaaaaagttgaacgaattgtcgtagttggttttgaccgtccgacgattacccgtgcgatggaaatgattgaggaatatgattttatttatgcagccattggctggcaccctgttgacgctattgacatgacagaggaagacttagcgtggattaaagagctttctgctcatgagaaagtggtagcgataggggaaatgggactggattatcattgggataaatcacctaaagatattcaaaaagaggtgtttagaaaacaaatcgccttagcgaaagaggtcaatttgcctattatcattcataaccgtgatgcaacggaggatgtcgtgaccattttgaaagaggaaggcgcagaagctgtgggcggaatcatgcactgctttacaggaagtgcggaagtggcaagagaatgcatgaaaatgaatttttatttatcatttgggggaccggtgacatttaaaaatgcgaagaaaccgaaggaagtagtgaaggaaattcccaatgaccggctgctgattgaaacggactgcccgtttctcacaccgcaccctttccgcgggaaaagaaatgagccaagctatgtgaaatatgtggcagaacaaatcgccgaattaaaagaaatgacctttgaagagattgcttccatcacgactgaaaatgcgaaaagacttttccgtataaactgacaaaaaacgctagcgggttttgtaagagcttgtcccttacagcgtttttctataaaagttctacatgctttcttctcctcataggataggtttgtcgacaagtctttcttccgtttctcagtgtatttcaggataatgaagaggacactgagcttttgggagaaagagaagggagggttgacagccttttagatactctatataatctctccgaggagaaggaggcgtttttcatcacacaaaaaatgaaaaagctgttttccgtaaagcttagcaaaagcaaagtcattctggttgctgcttgtttgcttttggcaggaagcgggactgcgtacgcggctcatgagctgacgaaacaatcagtctcagtttctatcaatggcaaaaagaaacatatacgcacacatgcaaatacagtcggtgatcttttggagacgcttgatataaagacaagagacgaagacaagatcacacctgctaaacagacaaagataacagcagacatggacgttgtgtatgaggctgcaaaacctgtgaagcttacaataaacggggaagaaaagacgttatggtcaacagcaaaaacggtcggtgcattactggacgaacaagatgttgatgtgaaagaacaagatcaaattgatcccgtaatagatacagatatttcgaaagacatgaagattaacatagagcccgcatttcaggttactgtgaatgatgcagggaaacaaaagaagatctggacgacttcgactacggtcgctgactttttaaaacagcaaaagatgaacataaaagacgaagataaaatcaagcctgcgttagatgcaaagctgacgaaaggaaaggctgatattacaattactcgtatcgaaaaggtcaccgatgtagttgaagagaagattgcgttcgatgtgaaaaagcaagaagacgcttctcttgaaaaagggaaagaaaaggtcgtccaaaaaggaaaagaaggcaagctaaaaaaacatttcgaagtcgttaaagaaaatggcaaagaagtgtccagagagcttgtaaaagaagaaacagctgagcaaagcaaagataaagtgattgctgtcggcacaaagcaaagcagtccaaaagttgaaacggtcagtgcttcaggtgattcaaaaacagttgtgtcccgcagcaatgaatcaacaggcaaagtcatgactgtatcatctacggcttatacggcaagctgcagcggttgttcaggacatacagcgacaggcgtcaatttaaaaaataatccgaatgccaaagtcatcgctgtggatccaaatgtcattccgctaggctccaaagtccacgtggaaggctatggatatgccattgctgcagataccggttcagcgattaaagggaacaaaatagacgtctttttcccagagaaatcatcggcgtaccgatggggaaataaaacagtcaaaattaaaatcttaaattaatatatacttatgtattcagagggttttgcgccctctgtttttttcgttataatagacaaagtgcattttctgcttattagacgctcgatataagaaaaagtttcatgaatatacaaaagtttttattttgtcttggaggaaataatgaaaattaaagagatcattgtggtcgaggggcgtgacgatacggcccgcatcaaattggctgttgatgcagacacaattgaaacaaatggttcagccatcgatgatcatgtgattgaccaaatccgtttggcccagaagaccagaggcgtcattattttaacggatccggactttccgggagagaagattcgcaaaaccatctcagaggctgtacctggctgtaagcatgcatttttgccaaaacatcttgccaaacctaaaaacaagcggggaattggtgtagagcatgcatcggttgaaagcattagggcatgtttagaaaatgtgcatgaggagatggaagcgcagccgagtgacatttcagctgaggatttgattcatgccggactaataggcgggcctgcggccaaacgccgccgggaacgactgggtgatctgttgaaaatcggctatacaaatggcaaacagcttcaaaaacggctgcaaatgtttcaaattaaaaaaagtgattttatgagtgcgctcgataccgttatgcgggaggaacagaatgaataaagatattgcgacaccgattagaacgaaagagatactgaagaaatacggtttttcttttaaaaagagcttaggacagaatttcttaattgatacgaacattttaaacagaattgtcgatcacgcggaagtgacggagaaaacaggtgtcattgaaatcggcccgggaatcggggctttaaccgaacagcttgccaagcgggcgaaaaaggtcgtggcatttgagattgaccagcgactattgccgattctgaaggatacactgtcaccttacgacaatgtcactgtcattcatcaggacgtgttaaaggctgatgtcaaatcagtcattgaagaacaatttcaagattgtgatgagatcatggtagttgccaaccttccttattacgtaacaacaccgattatcatgaaactgcttgaagaacaccttccgctgaaagggattgtggtcatgctgcaaaaagaagtggctgagcgcatggcggctgatccttcatctaaggaatacggctcgctttcaatcgcggtgcagttttatacagaagccaaaacggtgatgatcgttccgaaaaccgtatttgttcctcagcctaatgtcgattccgcagtcatccgtctgattctccgagacggcccggcagtggacgtggaaaacgaatcctttttctttcagctcatcaaggcaagctttgcacagcgtcgtaaaacgctgctcaataacttagttaacaatctgcctgaaggaaaagcgcaaaaatcaacgattgagcaagtgctcgaagaaacaaatattgacggtaagcgccgaggcgaatccctgtctattgaggagttcgcagcgctgtctaacggattgtataaagcccttttctaaaagggctttttgttttgcgcaccacatggactgccgctacataggctagagaaggacctttcattcaatgataagaaaaaacttggactcagcgaaaaaaggcgctttctcaaggctctttctttcatgatgaggcttagtctatgtgtggagtgaggaatgtgcaatttcaaataggggatatggtagccagaaaatcctatcagatggatgttttgtttcgaattataggaatagagcaaacaagcaaaggaaattcaattgccattttgcatggagatgaagtcaggctgattgctgattcggatttttctgatctggtagcagtgaaaaaagatgagcagatgatgcggaaaaagaaagatgagagcagaatgaatgagtcgctcgaattgctccgccaagattataagctgctcagagaaaagcaggagtactatgcgacaagccaatatcagcatcaggagcattatttccatatgccgggcaaagtgcttcatctggatggcgatgaagcatatctgaaaaaatgcctgaatgtctataaaaaaattggagtgccggtctatggcatccattgccatgaaaagaaaatgtctgcttctattgaagaattgctcgacaaatatcgacctgatatcctggtgatcacagggcatgatgcgtattcgaagcaaaagggcggcattgatgatttgaatgcgtacagacattctaagcactttgttgaaactgttcaaacagcccgaaaaaagatccctcacttagatcagcttgttatttttgcgggggcctgccaatcccattttgaatcactcatcagagcgggtgcgaattttgcgagttcaccgtcaagagtcaatattcatgcgcttgatccggtatatatcgtcgcgaagatcagctttacgccgtttatggaacggattaatgtatgggaagtgctccgtaatacgctgacaagagagaaagggcttggaggtattgaaacaagaggagttctgagaattggtatgccttataagtccaattaacagttgaaaacctgcataggagagctatgcgggttttttattttacataatgatacataatttaccgaaacttgcggaacataattgaggaatcatagaattttgtcaaaataattttattgacaacgtcttattaacgttgatataatttaaattttatttgacaaaaatgggctcgtgttgtacaataaatgtagtgaggtggatgcaatggcgaagacgttgtccgatattaaaagatcgcttgatgggaatttaggtaaaaggctgacgttaaaagcaaacggtggccgccgaaaaacgattgagcgttcgggcattttagctgagacgtacccttctgtttttgtgatacaactagatcaagacgagaactcgtttgaaagagtttcatacagttatgctgatattttgactgagactgttgagctgacatttaatgatgacgccgcaagctcagtggcattttaacgggcagtgaaccttttgtttactgctttttgttttgcccttttttggtttccaataattttaacgaaagttccatctgatttaacaaaagataaaacagtcacatattatcgtgacgtgcacgaatggctatcacttctaaaaaaggggttgtttcgtttgggcagacgtcgtggagttatgtcagatgagtttaaatatgagctggctaaagaccttggtttttatgacacagtaaaaaatggcggctggggcgaaattcgggctcgcgatgccggtaacatggtaaagcgcgctattgaaatcgccgaacagcaaatggctcagaatcagaataaccgataaggatgtgacccgggggacgtgctgttccctggtttttttattttggatataaatacataatgggctgaatatggatatgttcatcctgtacttcaaatgtgatacaatgttcatacttatgtttagatggagaagtaggtgaaagctatgcgtattttagaaaaagcgccagctaagatcaatctgtcacttgacgtcacccgaaaacgcccggatggctatcatgaagtcgaaatgatcatgacgacaattgatttagctgatcgaattgaattgacggagcttgcagaggatgaagtgagggtttcctcccacaaccgatttgtgcctgatgaccaaagaaacttagcttatcaggctgccaagctgatcaaggacagatacaacgtgaaaaagggagtttccatcatgattacgaaggtaattccggtggctgccggtcttgccggcggaagcagtgatgcggcggcgacactcagagggctgaacagactgtggaatttaaatctgtccgcggaaacgcttgctgagcttggagcggaaattggctctgacgtttcattttgtgtctatggcggaactgcattagcaacagggcgcggcgagaaaattaaacatatcagcacgcctccgcactgctgggtcattttagcgaagccgacaatcggtgtttcaactgctgaagtgtacagagcgctgaaactggatggtatagagcatcccgatgtacaaggcatgatcgaggcgatagaagagaagagttttcagaagatgtgcagccgtttaggcaatgtgcttgaatctgttacactcgatatgcatcctgaagttgcaatgatcaaaaaccagatgaaacgctttggtgcagatgccgtgttaatgagcgggagcggcccgacagtgtttggactggttcagtatgagtcgaaggtgcagagaatttataacgggttaagaggcttctgcgatcaagtttatgcggtgagaatgatcggcgaacagaacgctcttgattaaatccgtatgttaagttatattgatcttaaaatattcggattttgggggtaagttcatgaagtttcgtcgcagcggcagattggtggacttaacaaattatttgttaacccatccgcacgagttaataccgctaacctttttctctgagcggtatgaatctgcaaaatcatcgatcagtgaagatttaacaattattaaacaaacctttgaacagcaggggattggtactttgcttactgttcccggggctgccggaggcgttaaatatattccgaaaatgaagcaggctgaagctgaagagtttgtgcagacacttggacagtcgctggcaaatcctgagcgtatccttccgggcggttatgtatatttaacggatatcttaggaaagccatctgtactctccaaggtagggaagctgtttgcttccgtgtttgcagagcgcgaaattgatgttgtcatgaccgttgccacgaaaggcatccctcttgcgtatgcagctgcaagctatttgaatgtgcctgttgtgatcgttcgtaaagacaataaggtaacagagggctccacagtcagcattaattacgtttcaggctcctcaaaccgtattcaaacaatgtcacttgcgaaaagaagcatgaaaacgggttcaaacgtactcattattgatgactttatgaaagcaggcggcacaattaatggtatgattaacctgttggatgagtttaacgcaaatgtggcgggaatcggcgtcttagttgaagccgaaggagtagatgaacgtcttgttgacgaatatatgtcacttcttactctttcaaccatcaacatgaaagagaagtccattgaaattcagaatggcaattttctgcgtttttttaaagacaatcttttaaagaatggagagacagaatcatgacaaaagcagtccacacaaaacatgccccagcggcaatcgggccttattcacaagggattatcgtcaacaatatgttttacagctcaggccaaatccctttgactccttcaggcgaaatggtgaacggcgatattaaggagcagactcatcaagtattcagcaatttaaaggcggttctggaagaagcgggtgcttcttttgaaacagttgtaaaagcaactgtatttatcgcggatatggaacagtttgcggaagtaaacgaagtgtacggacaatactttgacactcacaaaccggcgagatcttgtgttgaagtcgcgagactcccgaaggatgcgttagtcgagatcgaagttattgcactggtgaaataataagaaaagtgattctgggagagcccgggatcacttttttatttaccttatgcccgaaatgaaagctttatgacctaattgtgtaactatatcctattttttcaaaaaatattttaaaaacgagcaggatttcagaaaaaatcgtggaattgatacactaatgcttttatatagggaaaaggtggtgaactactgtggaagttactgacgtaagattacgccgcgtgaataccgatggtcgcatgagagcgattgcatccatcacgctggatcacgaatttgttgtacatgatattcgtgtgattgatggaaacaatggtcttttcgttgcgatgccgagtaaacgcacccctgatggagagttccgcgatattgctcatcctattaattcaagcacgcgaggaaagattcaagatgccgtgttaaatgagtatcatcgtctgggtgacactgaagcattagaattcgaagaagctggagcttcttaaaaaataaccaaaaagcaaggactgctgaaagggctgacataagccttttgccggcggtccttttttaattctgatttttcaaacttagttgcactcaatagaaaattcttgcacttcatgaagtctccttgaaatcagaagatatttaggatatatttttctatggataaaagggatattggaggccaataaatggataagcggtttgcagttgttttagcggctggacaaggaacgagaatgaaatcgaagctttataaagtccttcatccagtttgcggtaagcctatggtagagcacgtcgtggacgaagccttaaaattatctttatcgaagcttgtcacgattgtcggacatggtgcggaagaagtgaaaaagcagcttggtgataaaagcgagtacgcgcttcaagcagaacagcttggcactgctcatgctgtaaaacaggcacagccatttcttgctgacgaaaaaggcgtcacaattgtcatttgcggagatacgccgcttttgacagcagagacgatggaacagatgctgaaagaacatacacaaagagaagcgaaagctacgattttaactgcggttgcagaagatccaaccggatacggccgcattattcgcagcgaaaacggagcggttcaaaaaatcgttgagcataaggacgcctctgaagaagaacgtcttgtaactgagatcaacaccggtacgtattgttttgacaatgaagcactatttcgggctattgatcaggtgtctaatgataatgcccaaggcgagtattatttgccggatgtcatagagattcttaaaaatgaaggcgaaactgttgccgcttaccagactggtaatttccaagaaacgctcggagttaatgatagagttgctctctctcaggcagaacaatttatgaaagagcgcattaataaacggcatatgcaaaatggcgtgacgttgatcgacccgatgaatacgtatatttctcctgacgctgttatcggaagcgatactgtgatttaccctggaactgtgattaaaggtgaggtgcaaatcggagaagatacgattattggccctcatacggagattatgaatagtgccattggcagccgtacggttattaaacaatcggtagtcaatcacagtaaagtggggaatgatgtaaatataggaccttttgctcacatcagacctgattctgtcatcgggaatgaagtgaagatcgggaattttgtagaaattaaaaagactcaattcggagaccgaagcaaggcatctcatctaagctatgtcggcgatgctgaggtaggcactgatgtaaacctgggctgcggttcaattactgtcaattatgatggaaagaataagtatttgacaaaaattgaagatggcgcgtttatcggctgcaattccaacttggttgcccctgtcacagtcggagaaggcgcttatgtggcggcaggttcaactgttacggaagatgtacctggaaaagcacttgctattgccagagcgagacaagtaaataaagacgattatgtgaaaaatattcataaaaaataatcctaaattcggaggtttatccatgtctaatcaatacggagataagaatttaaagattttttctttgaattcgaatccagagcttgcaaaagaaatcgcagatatagttggagttcaattagggaaatgttctgtcacaagatttagtgacggggaagtccaaattaatatcgaagaaagtattcgcggatgtgattgttacatcatccagtctacaagtgaccccgttaacgagcatattatggaactgctgattatggtagatgcgttaaaacgcgcttctgcaaaaacgattaacattgttattccttattacggttatgcgcgtcaagacagaaaagcaagatcccgtgagccaatcacagctaaacttttcgctaacctgcttgaaacagccggtgcgactcgtgtgattgcacttgacctgcatgcgccgcaaattcaaggattctttgatataccgattgaccacttaatgggtgttccgattttaggagaatattttgaaggcaaaaatcttgaagatatcgtcattgtttcacctgaccatggcggtgtgacacgtgcccgcaaactggctgaccgactaaaagcgccaattgcgattattgataaacgccgtccgcgtccaaacgtggcggaagtcatgaatattgtaggtaacatcgaagggaagactgctatcctcatcgatgacattattgatactgcaggtacgattacacttgctgctaatgcgctcgttgaaaacggagcgaaagaagtatatgcatgctgtacacaccctgtactatcaggccctgcggtagaacggattaataattcaacaattaaagagcttgttgtgacaaacagcatcaagcttcctgaagaaaagaaaattgaacgctttaagcagctttcagtcggaccgcttctggcagaagcaattattcgcgttcatgagcagcaatcagtcagctaccttttcagctaaaccgattttgaaaggtttaaacctttatcgttttgggtattgtttgtaataggacaactaaaacgacaataggatggtgctgaatatggcaactttaacggcaaaagaaagaacggactttactcgttcgtctcttcggaatatccgtacttcaggacatgttccaggtatcatatatgggaaggatacgggtaacaaacctgtgtcattagacagtgtggagctcatcaaaacgctgagggacgaaggcaaaaatgcagtcattacgcttgaggtcagcggagaaaaacactcagtcatggtaacagacctgcagacggacccgctgaaaaatgaaatcactcatgctgattttcaagtagttaatatgagtgaggacattgaagtggaagttccgattcatctgaccggagaagccattggagtgaaaaacggaggcgtactgcagcagccgttatatgcacttactgtaaaggccaagccaaaagccattccgcaaacgattgaggctgatatttcaagcctcgatgtaaatgaagtactgacgattgcagatttgcctgctggcggtgactactcctttaatcatgaatcagatgaggttgtggcttcaatccttcctccgcagcagcaggaagcagctgaggtcgatgaagaggaatctgccgatgctcagccagaaggtgaaaacgaacaataatagcttaaggcgtaaccctcccgcggttacgtcttttgtgctagaatgagaagaattatagcccgtttatgaagacgggagttatgtgactaagggaggattcgccatgcttgtgattgccggtctcggaaacccggggaagaactatgaaaacacacggcataatgtcggatttatggtgatagatcagcttgcaaaggaatggaatatagagctgaatcaaaataaatttaacggattatacggaaccggatttgtttccggcaaaaaggttctacttgttaaaccgcttacatatatgaatttatcaggagaatgtttgcggcctttaatggactactatgatgtcgataacgaagatttgacagtcatttacgacgaccttgaccttccgactggcaagatccgtttaagaacgaaaggaagcgccggagggcacaatggcatcaaatcactgatccagcatcttggaacatccgagtttgaccgtatccgcatcggaatcggccggcctgtaaacggcatgaaggtcgttgattatgtgttaggctcctttaccaaggaggaggcacctgagatcgaagaagcggttgataaatctgtgaaggcttgtgaggcttctttgagtaaaccgtttttagaagtcatgaacgaatttaacgcaaaggtataaaatgtaacaacaaagtccatactacaccaaaatgactttttcatcaggaggtcccttgtatggctttgcattattattgtcgtcattgcggagtgaaagtaggcagtctcgaatcttcaatggtatcgacagactcacttggatttcagcacttaacaaatgaggaaagaaacgatatgatttcttataaagaaaatggagatgtccatgttttgacgatatgtgaagactgccaagaggcgcttgaccgaaatccgcattaccacgaatatcacacatttattcaataaaaagctttggtgtagacactagaccaaagcgtttttctgttctcgcaggaaacagagaggaggggccatatggacaacattcaaacctttataaaagaaagcgatgactttaaatccatcatcaacggtttacacgagggcctgaaggaacagctgctcgcgggtctgtcgggttccgcgcgttctgtttttacttctgctctggctaatgaaacgaataagcctatctttctcatcacccataacttatatcaagcccagaaagtaacagatgatctgacttcacttctagaggatcggtctgtccttttgtaccccgtcaatgaactcatttcatcagaaatcgcagttgcaagccctgaattgcgggcgcagcgattagaagtcattaatagactaacgaatggagaagcgccaattgtcgttgctccggtagctgcaatcagaagaatgctgccgcctgttgaggtgtggaaaagcagccagatgctcattcaagtaggccatgatattgaacctgaccagcttgcctcacggctggtagaggtagggtatgagcggtctgatatggtttctgcgcccggggaattcagtattcgcgggggaatcattgacatttatccgttgacttcagagaatccggtgagaattgaactttttgacaccgaggtggattcaatccgcagctttaattcagatgatcagcggtcaattgagacccttacctcgatcaatatcggtcccgcgaaggaattaattatcagaccggaagaaaaagcgcgggcgatggagaaaatcgatagtggtcttgccgcgagcttgaaaaaattaaaggctgacaaacaaaaagaaatacttcatgcgaatatttctcacgataaagaacgcttgtctgaaggccagacagatcaggagctcgtgaagtatctctcatatttctatgaaaagcctgctagtttactagattatacacctgataatacacttctgattttggatgaagtcagtcggattcatgagatggaagaacagcttcaaaaagaagaagcggagtttataacaaatcttcttgaggaagggaagattttgcatgacattcgtttgtcattcagcttccaaaaaatagtggttgagcaaaaacggcctctgctgtactactctttatttttgcggcatgtacaccatacgagcccgcaaaatatcgtcaatgtgtcaggccggcaaatgcagagtttccatggccaaatgaacgtgcttgcgggcgaaatggagcgttttaaaaaatcaaatttcactgttgtgttcttaggagcaaacaaggaacgtacacagaaattgtcatctgttttggctgattatgatatcgaggctgccatgacagacagcaaaaaagcgcttgttcagggacaggtctatatcatggaaggcgagctccaatcgggatttgagctgccgttaatgaagcttgccgttattacggaagaagaactgttcaaaaaccgtgtaaagaagaagccgcgaaaacagaagcttaccaatgcagagcgcatcaaaagctattctgagcttcaaattggagattatgtcgttcatattaatcacgggatcggaaaatacctggggatcgaaactcttgaaatcaacggcattcataaagactatttaaatatacattatcagggcagtgacaagctttacgtccctgtagaacaaattgatcaggtccaaaaatatgttggctccgaaggaaaagagccaaagctgtataaattaggcggaagtgaatggaagcgggtcaagaaaaaagtagagacatccgttcaggatattgctgacgacttaattaagctgtatgccgaaagagaagcgagcaagggctatgcgttttctcctgaccatgagatgcagcgtgaattcgaatcggctttcccttatcaagagactgaggatcagctccgttcgattcacgaaatcaaaaaagacatggaaagagaacgtccgatggaccgcttgctgtgcggagatgtgggctacggtaaaacagaggttgccatacgtgccgcgtttaaggcgatcggtgacggaaagcaggtagctctgctcgttccgacaacaattttggcacagcagcactatgaaaccataaaagagcgcttccaggactatccgattaatatcggccttctcagcaggttcagaacgcgaaaagaagcaaacgaaacaatcaaagggctgaaaaacggaacggttgatatcgtcatcgggacgcatcggctgctatcaaaggatgtcgtgtataaagacttagggctcctcatcattgatgaagagcagcgtttcggtgtaacccataaagaaaagatcaagcaaataaaagccaatgttgatgtattaacgttaacagcaacaccgattccgcgtacgctgcatatgtctatgcttggcgtaagggacctttcagtcatcgagactccgccggaaaatcgcttccccgtacagacgtatgttgtggaatataacggcgctcttgtcagagaggcgattgaacgtgagcttgcacgcggaggccaggtctatttcttgtacaaccgggtagaggacattgagcggaaagcggatgaaatttcaatgctagtccctgacgcgaaggtagcatatgcgcatgggaaaatgacagaaaatgaattagaaaccgttatgctaagttttcttgaaggagaatcagacgttctcgtcagcacaaccattatcgaaactggcgtggacatcccgaacgtcaatacgctgatcgtatttgacgccgacaagatgggactttctcagctttaccagctgcgggggcgtgtcggccgttctaaccgtgtggcgtatgcgtacttcacgtatcgccgggataaagtgctgacagaagtggctgaaaaaaggctgcaggctattaaagaattcacagagctaggttccggttttaaaatcgcaatgcgtgacttaacgattcgcggagctgggaatcttcttggtgcccagcagcatggcttcatcgattcggtcggatttgacctctattcacaaatgctgaaggaggccattgaggagcgtaaaggagacacagcgaagacagagcagtttgaaacagaaattgatgtcgagcttgatgcgtatattccggaaacttatattcaagacggcaaacagaaaattgatatgtataaacgcttcaggtctgtggcgacaatcgaagagatgaatgagcttcaagatgaaatgatcgaccgctttggaaactatccaaaagaagtcgaatacttgtttactgttgcagaaatgaaagtctatgcgagacaggaacgtgtcgagctgattaagcaggataaagatgctgtcagattgacgatttctgaagaagcaagtgctgaaattgacgggcagaagctgtttgagcttggcaatcaatatggcagacaaatcggactgggaatggaagggaaaaaactcaaaatctccatacagacgaaaggccgtagtgctgatgaatggctcgacaccgtgctgggcatgctgaagggcttaaaagatgtgaaaaagcaaaccatttcatcaacgtaaattttgttactctctggtgtatattacatttgatgtgacggatactaatttcaagcgaggcggaaggtacataaagtaactgctttaggtctttcccacatgtatataccatcaaatgaaagagaggcaccagagatgaaagcaaccggtatcgtacgtcgtattgatgacttaggtcgggtcgtgattcctaaagaaattcgaagaactctgagaatcagggaaggcgatccgcttgagatttttgtagatcgtgacggagaagtgattttgaaaaagtactctccgatcagtgagcttggagactttgcaaaggagtatgcagacgcgctttacgacagcctcggccattcagtgctgatttgtgatcgtgatgtgtatattgccgtgtccggcagctccaaaaaagattacttaaacaagtcaatcagcgaaatgctggaaagaacaatggatcagcgcagctccgtgcttgagagtgatgcgaaatcagtacagcttgtgaatggaattgatgaggacatgaattcttatactgtcggcccaattgtggcgaacggtgatccgataggtgctgtggtgatcttttcaaaagatcagacaatgggcgaagtagagcataaagccgttgaaacagcagctggatttttggctcgtcaaatggaacagtaggtcttattcctttcttcgaaaataggtatgtaaagaacagctctccttgggacgctgttctttttcatgcgtgccgaaaaaggaatccaagggttgggatgtggtataataacctcgtttttatttgtgccgcggtaatacgtgaaccgtattgcccctgacgttgggaaggagcttttggatggacgattcaataggcgttaaacggcattggatttggcagggggcttttgttttaattctggcaggcatcatcacaaaaattttaagcgctgtttacagagtcccgtttcaaaacattgtcggcgatgttggattttatatatatcagcaggtatatccctttcttggtattgcggtcatgctgtccacatcaggatttccagtcattatttcaaagctgatgaatgattatagtgaaaaaaatcatcacaccatattaaaaatatcagcgttgtttttgtctttaatcggtattttattatttctttgtttatatctgggtgctgttcctattgcactctttatgggagattcgcatctagccgtgttaattcaagtggccgcatacgcgtttctgctgttcccatttgtcgcgttgcttagaggcggttttcaggggcggcacgaaatgctcccttcagccttatcacagatgacagagcagtttctgcgtgttgcggtgctcttgggtttatcattttggctcgtgaaaaagggagcctcgctttatactgcgggagcggcagccgcttcaggctctcttgccggaagtttggttgcattgataatactgggttttttttggttcaaaacgaaaagagacaaccaaacggataggcaaaacgaaaatgtcatcacaacaaaagaattgacgaaaaaactgcttttatattcggttacaatttgtgtaagcagtttgctgcttttgtttatccagctcgttgatgctttgaatttatatgcattgctttcgggtggtgaggcaagcgaagaagcaaaacgcttaaaggggatctatgatcggggacaacccttgctgcagctcggctcagtttttgccgtaagcattgcgacgtcactcgttccgtatatttctatggctgtaaaaaacaaagagctgaagatcatgaaagaaaaaatcacgtcatctttgaaactatgccttgtgctcggtacaggcgcatcggctgggttgatttgcattcttaagccggttaatatcatgctgtttcaaaatggagaagggacaggtgcgttacaagtatttagctgctccattttgtttgcatccttggcggtaacggcagcggcagtcttacagggagcggggtacacagtttttcctgcgatagcggtgggcgcgggtgttgcagtgaaatgggtgttaaacacacttttggttccgcgctatgggattgaaggcgcatcgcttgcgacagctgcttcctttgcggctgtcgccggccttaacttgtatcagcttcggcaaaaggaatggctcgataagcttagaggcgttttgattccgattattggatctgctcttttgatgtcagctgttttgcttgcgtatacgcgtctctggactttcttgtttcctgcaacaggaagaggagcggctgtgattgagagtctttctgctgttgccattggtggcgcggtgtttatttattgtatgatgagattgggaatatttacagatgaagagctgaacagtgtgccattcggcagcaagttaagcaaattcatgagaaggagagaacaaaatggcgggtaaaattacagtcgtcggacttggtgccggagacatggaccaattgacaattggtatacacaagctgctgacgaaggcagatacgctgtatgtcagaaccaaggatcatcctttaattgaggagcttgaaaaagaaacgaagaacatccgtttctttgatgatatatatgagaaacatgatcagttcgaggcggtatatgaagaaattgcagatatcctctttgaagcggcgcggcgtgaggacgtggtttacgctgtgccgggacacccttttgtcgcagaaaaaacagttcagctgctgacggagcggcaggaaaaggaaaacgttcaagtgaaagtcgcggggggacaaagtttccttgatgccacattcaatgccttgcaaattgacccgattgaaggttttcaatttgtggatgccggcacattgtccgcggatgagcttgagctcagacatcatctgatcatatgtcaggtttacgaccaaatgacggcttctgaagtcaagctgacattgatggagaagctgcctgatgattatgaggtcgtcattgtgactgcagcaggcagccgtggcgaggagatcaggacagtgccattatttgagctggaccgcaatgtcgctttgaacaacttaacaagtgtgtatattccgccgattaaagaagagaagctgctttatcacgaattctccacgttccgaagcatcatcagagagcttcgcggacctaatggatgtccgtgggataaaaagcagacgcatcagtcattaaagcagtacatgattgaagaatgttatgagcttctcgaagctattgacgaagaagacacagaccatatgatcgaagagcttggcgacgttttgcttcaggtcttgcttcacgcgcaaattggtgaagatgaaggttatttcacaattgatgatgtcataaaaggaatcagtgaaaaaatggtccgaagacatccccatgtgtttaaagatgttaaggttcaggatgaaaacgatgttttagccaattgggaagatataaaaaaggccgaaaaaaatacatctgaatcatcattactagacagcgtaccgaaaacccttccagctctttcgaaagcagctaaattgcagaaaaaagcagcgaaggtcggttttgactgggaagacgtcagcgatatttgggaaaaggtaagtgaggaaatgaaggaattttcttctgaggtttctgaagctcctcacgaacacaatcttaaagctgagtttggcgacattttgttcgcgctggtgaatgtagcccgcttctacaaaatagagccagaggaagcgctgaccatgactaatgacaaattccggagacggttctcgtacattgaggaaacagcgaaggaagagggagtcgagttggctgatatgtcccttgaggacatggacaaactgtggaatgaagcaaaagaaactgagaggagatcatagatatgagattagataaatttttgaaagtatcacggctgatcaaacggcgtacactagcgaaggaagtagctgaccaaggacgaatctctattaacggaaaccaagctaaagctagctctgacgtaaaaccgggagatgaactaacggtccgcttcggccaaaagcttgtaacggttcaagttaatgaattgaaagacacgacgaaaaaagaagaagctgcaaacatgtacacgattctaaaagaagaaaaactcggcgaataggcttgttctaaaaaaatcccccacctcatacaatgcagtaataatgctaaaagtatcgaggatatgggggctgaatagatgaattcatattatgatcaaaaaggttcttcgtctgttccggaacagcatgatgtgacaatgaaaggccggaagcatttagatatttctggggttaagcatgtggagagttttgataacgaagaattcctgctggaaacggtgatgggaatgctctccgtcagaggccaaaacctgcagatgaaaaatcttgatgtggaaaaagggattgtttcgattaaaggcagggtatttgatttagtgtacttagacgaacaacaaggggataaagctaaagggttttttagcaagttgtttaaatgacgctgacgacacaattctatacaatgctagcgatgtccggtatgggtctctggcttggtgcttcgcttgatacataccggctctttgtcattcgtgccaaaacagccagatggctattatttattcatgatattcttttctggattgtgcaagggctgcttttcttttatgtcttgcttcatgtaaatgagggagaattcaggatttacatctttttagcggttctgctgggcgttgcgacgtatcagagcctttgcaaacgaatctatataaaaatactgaaattcgtcatttaccttgttgcttctgtttatcaattcttcaaaaaactcattcagcacgtgttatttcgtcctattgtgtggacatgcggagcgatcatctggctggcggcatttttattcaagaaaacatacagcctgataggttttctcctgctgtgtctatataaaatagtcatggttctgtgttttccgatccgttttatcgcgaaacaatgtttgaaacttcttcctgtgaaaatgcgtctaacttttagacgttattttgaaaaaggtgcaggatttctcaaaaagaagaagaaactattgataaccataagaacgaccattacacggtttttgaagaaatgaaaggaggaccgtctggtttgaatttttccagggaacgaacgataactgaaatacaaaacgactataaagaacaagtagaacggcaaaatcagctgaagaaacgaagacgcaaagggctgtacagacggttaactgtattcggcgccctagtattcctgacggcaattgtgctggcaagctctgtatggtcccaaacatcttcccttagtgcaaaagaagaaaagaaagaacagcttgaaaaagaactgaaaagtttaaagacaaaacaaacggatttaaaagaagaaatatccaaattgaaggatgaggattacgtcacagagcttgccagaagggacttattcatgtctggagacggagaaattatcttcaatgtggagaagaagagcaagtagccttgttgacacttaaatttttatttaggtataattaagcaaacgatctttttataagcctaaggaggagcactttttttatgtcgattgaagttggcagcaagttgcaagggaaaattacaggtattacaaattttggagcatttgttgaattgcctggaggctcaaccggtctcgttcacattagtgaggtagctgataattatgtcaaagacattaacgaccacttaaaagtcggcgaccaagttgaagtgaaagtcatcaacgttgaaaaagacgggaaaattggtttatctattaaaaaagctaaagaccgtccgcaagccagacctagaaatgatttccgtccgaaagaatcttttgaacagaaaatgaataagtttttaaaagacagcgaagatcgcttgtcatctttaaaacgcaatacggaatcaaaacgtggagggcgcggagcaagaagaggataacttgctgctttctataaaataaatgaagcatccgttcatcccgacggatgcttttttattatcctcatcctctttaagagtcagaaaattacaacattaaagtttctgttgacgaaagagacaaacctttgtattatataacttgtgcttagaagcacaaaacaatatggcggtgtagctcagctggctagagcgtacggttcatacccgtgaggtcgggggttcgatcccctccgccgctaccatatttgtttggcccgttggtcaagcggttaagacaccgccctttcacggcggtaacacgggttcgaatcccgtacgggtcatcctaaaaaatcggtttctcttgcagaagccgatttttttcatttttagacaacattccggaaattcttttcataaacgaatatcaaggcagaaaccgtcgaagatttctttggtattgttaccttcttttgacaaaatcctatctgtgctttcgctataatgacaggcaacgaatataacaggtgggagatgagaggaatggaaaaagcagaaagaagagtgaacgggccaatggcgggacaagctttggaaaaactccaatcgttttttaacaggggcacgaagctggtgactcatcatttgcattcactgtttttctataaaggattcatttatgttgttatcggatttttgcttggacgggctttcatattatccgaggtgcttcctttcgcacttcctttctttggagcgatgcttctcatcagaagagacaaagcgttttatgcggttttggctgtgcttgcaggtgcgctgaccatatctccaaagcactcattgctcatactggcggcattgctggcattcttcgtattttctaaagtggctgccttcattaccgacgatcgtgttaaagcactcccgattgtcgtgttcttctcgatggctgcagcaagagccgggtttgtttatgcccaaaatggcgtatttacaacctatgattatgtaatggctatcgttgaggctggactgtcgtttatcttaacactgattttccttcagagccttccgatttttactgtgaaaaaagtgaaacaatcattaaaaatagaggaaattatctgctttatgattcttattgcctctgttttaacggggctggctggcttgtcctaccaagggatgcaggcagaacatatattggctcgttatgttgtgttgagtttttcctttattggcggagcaagcatcggctgtacggttggtgttgtgaccggcctgattcttggcttggcgaatatcggaaacctatatcaaatgagtctgcttgctttttccggtttattgggcggtttgctgaaggaaggaaaaaaagcgggtgcagcaatcggtctgatcgttggttcacttcttatatctttatatggtgaaggctctgccggtctgatgacaacgctctatgagtcattaatcgcagtcggcctgtttttgctcacacctcaatctattacaaggaaagtggcgagatatattccgggaactgtcgagcatcttcaagagcaacagcaatacgctagaaaaatccgtgatgtcactgctcagaaggtagaccagttctccaatgtatttcacgcgctgtctgaaagctttgcaaccttttaccaagcgtcagacgaacagacagatgacagcgaagttgatctgttcttaagcaaaatcacggagcattcctgtcagacgtgctacaagaaaaacaggtgctgggtacagaactttgataaaacatatgatttaatgaaacaagttatgcttgaaacagaggaaaaagaatatgcatcaaaccgaaggctaaaaaaagagtttcaacagcattgttctaaatccaagcaggttgaagagctgattgaggatgagctcgcacatcatcatgcccatttgacactcaagaaaaaagtccaagacagcaggcgccttgttgctgaacagcttttaggtgtttctgaggttatggccgacttttctcgggaaataaaaagagagcgagaacagcactttctgcaggaagagcaaatcatagaagcgcttcagcatttcggaattgagattcagcatgtcgagatctatagccttgaacaaggaaatatcgatattgaaatgaccattccgttcagcggacatggagaaagtgaaaaaatcattgcccctatgctgtctgacattctggaagaacaaattcttgtgaaagctgaacagcactctccgcatccgaatggatacagccatgtcgcctttggatcaacaaaatcatacagggtgtccacgggagctgctcacgctgcgaagggcggcggccttgtctccggcgacagctacagcatgatggagcttggagccagaaaatatgctgcagcaatcagtgacggaatgggcaatggcgcaagagcgcactttgaaagcaatgaaacgatcaagcttcttgaaaaaatccttgaatcgggaattgatgaaaaaatagcaattaaaacgatcaacagcatactgtctctaaggacaactgacgaaatatattccacgcttgacctatctattatcgatcttcaagatgccagctgtaaatttttgaaggttggatcgacgcctagctttatcaaacggggtgaccaggtcatgaaagttcaagcgagcaatctgccaatcggtattattaatgaatttgatgtggaggttgtgagtgaacagctgaaagctggtgacctcttaattatgatgagtgatggcatttttgaggggcctaagcatgtggaaaatcacgacttatggatgaagcgtaaaatgaaagggttgaaaacaaatgacccgcaggagattgcagatttgcttatggaagaagtcatccgcacaagatccggccaaattgaggacgatatgactgttgttgttgtccggattgatcacaatacaccgaagtgggcatccattcctgttccggcaatctttcaaaacaaacaagaaatttcataacgcttccgtataaatcaaatttcttctggcgaagatgggaatatatgaatctgagaatcctcgtattctccaggaggaatgaatgtgaacaacggacatttaaatcaaattttgctgataacggatggctgctcaaaccatggggaagacccgcttgcaatggctgcttttgctaaagagcaggggattacggtaaatgtcattggtataatggaagaaaatcaaattgaccctgaggcaatgaaggaagtcgaagggattgcacttgccggaggaggtgtgcaccaagtcgtttatgcatctcagctttcacaaactgttcaaatggtaacaaagaaagcgatgacgcaaaccttacaaggtgtagtcaatcaagaactgaaacagattctcggaaagaatgtggaaatggaagagctttctccggaaaaacgcggcgaagtcatggaagtggtagacgagcttggagaaacggtgcatcttcaggttttggttcttgttgatacaagtgcaagtatggcgccaaagcttccaacagtaaaagaggcgctgattgatttgtctgtaagcctcaattcccgaatcgggaataacgaatttgcgatgtgtatatttcccgggaaaaaacaagaggtcgagcttgtgctgaactggacaccgaagctgcaatctctttccacactctttgcaaagctttcgacaggcggcatcacgccgacaggtccggcgattcgtgaagcgacactgcagtttgaaaaaatacgctcaagaaggggcatgctggcagatgatgaacgacgctttgacgagtttggcatgtagcctcaagccgggtacgacaatcaaaggcaagtggaatggaaacacttatacattgcgtaaacagcttggtaaaggggccaatggaattgtgtatttggcagaagcatcagatggacatgttgccttaaaggtgagtgatgacagcctgtctattacttctgaagtgaatgtcttgaaatctttctcaaaggcccagtccgttacgatggggccttctttttttgatacggatgatgcctatattcccagtaccaatacgaaagtttcattttatgcaatggaatacataaaagggccgctgcttttgaagtatgtcagtgataaaggagcagagtggatacctgtattaatgattcagctgttatccagcttatcggtgcttcaccagcaaggatggatattcggcgatcttaaacctgataatctgatcgtaactggtccgcccgcaaggatccgctgcattgatgtgggcggcacgacaaaggaaggccgggcgataaaagagtatacggagttttatgacagaggctattgggggtatggaacaagaaaggcagagccatcctatgatctgttcgcagttgccatgattatgatcaacagtgtgcataaaaaagaatttaagaaaacgaaccagcccaaagaacagcttaggtctctcatcgaaggaaaccctctgcttcaaaagtataaaaaagtgcttttttcaaccttgaacggagattatcaatccgcagatgaaatgaaaaaggatatgctagacgcggggcaaaaagcagcacaaagaaaacagcctataaaagcatcaccgcagcctgccacacgacatagacagcaaaaaccgcgccaaggaaaaataacgaagacgcgatataccccaaaacagaaaccggctaagtcgggggggttatttgaaacaacgctgatcgtgatcagtgttttagcgctttatttcgcctatattatctttttcttaatctgaatggtgcaaactgcagagcctatgcttcttctttgcttggaggggttgaaagtgttaggatatgaatatctttaaaatacctgctcattgtgaggaggacattgtgaaaagtgtcaaagattttttaaacaaacacaatcttacgttaaaaggggcgacgatcattgtaggcgtttctggcggtccggactcaatggctcttcttcacgcgttgcatacgttatgcggccgttcagcgaatgttattgcagctcacgttgaccatcggttcagaggtgcggaatccgaggaggacatgcgttttgtccaagcttattgtaaagctgaacagctcgtgtgcgaaacggctcaaatcaatgtaaccgcatatgcacaggaaaaaggactcaataagcaggctgcagcacgcgattgccgctaccagttttttgaggaaatcatgtcgaagcaccaagcggactatctggctcttgcgcatcatggtgatgaccaggttgaaacaatgcttatgaaactggctaagggtacgcttggaacgggacttgcgggaatgcagccggttagacgttttgggacggggcggatcatcaggccgttcttaaccattacaaaggaagagatccttcactattgccgtgaaaacggcttgagctaccggacggatgaaagcaacgccaaagatgactacacaagaaacagattcagaagaacagtgctcccgtttttgaagcaggaatctccggatgtgcataaaaggtttcagaaagtgagtgaagcactgacggaagatgagcaattcttacagtcattaacgaaagatgaaatgaataaagtaatcacaagccagtctaatacatcagttgaaatcaattcctctcaattgcttgccctcccgatgcctttacaaagaagaggagttcaactaatattaaactatctttatgaaaacgttccatcatccttttcagcccatcacattcagcagtttctcgattgggcggaaaatggcagtccttcaggagtactggactttccgaaaggactgaaggtggtcaaatcatatcagacatgtttgtttacatttgaacaatggcagtgcaaaaatgttccctttgaataccaaattagcggagcttctgatgaaacggcagtgctccctaatggatatctgatagaggcaaggcattatgcggactcgcctgaagaacatgggaatgctgtttttatcacaagtgaaaaaaaggtgcgatttcccttaacaatccggacgagaaaagctggagaccggatcaaactaaaagggatgaacggctcaaaaaaggtaaaggatatatttattgataagaaactgcctctccaagaaagagacaactggccgattgtgacggacgcaagcggtgaaattatctggatacctggcttgaaaaaatcaatttttgaagatcttgtgattccaaacagcgaccgcattgtattacaatatagacagcatgaaaagtgtagggggcaagcaaaatcatgatgaaacatgatatcgagaaagtactgatctcagaggaagagatacaaaagaaagtaaaagagttaggtgcagaattaacgagcgagtatcaagatacatttccgttggcaatcggtgtgttaaaaggagcacttccttttatggcggatcttatcaagcatattgatacatatttggaaatggatttcatggatgtatcaagctacggaaattctacggtttcttctggagaagtaaaaatcattaaagatttggatacatctgtagagggccgggacatcttaattattgaagatatcatcgacagtgggttaaccttaagttatctcgtagagctcttccgataccgtaaagcaaaatcaattaagattgttacccttttggataaaccgagcggaagaaaagcggacatcaaagcagactttgtcggttttgaagttcctgacgcgtttgtagtgggttacggacttgattatgctgagcgctatcgcaatctgccttatatcggagtgttaaaaccggcagtttatgaaagctgatcggcagcctgcttccgagatggttattgtttgtattggaatgattttctatggtactattgaacatagttgtgcttactgtgggaggaggtaaggaatgaatcgggtcttccgtaataccattttttatttacttattttattagtagtaatcggggttgtgagctacttccagacctcaaatccgaaaacagaaaatatgtcgtacagtacgttcatcaaaaacctggatgacgggaaagttgatagcgtatcggttcagcctgtcagaggtgtttatgaggtaaaagggcagctgaaaaactacgacaaagatcaatactttttgactcatgttcctgaaggaaagggagcagaccagatatttaacgctttgaaaaagacagacgtaaaggttgagcccgcgcaagaaacaagcggatgggtgacgttcctgacgaccatcatcccatttgtcattatctttattctgtttttcttcctgctcaatcaggctcaaggcggcggcagccgtgtcatgaactttggcaagagtaaagcgaagctgtatacagaggaaaagaaacgcgtcaaatttaaagacgttgcaggggcagacgaagaaaagcaagaacttgttgaagttgttgagtttctgaaagatccccgcaagtttgccgagctcggcgccagaataccgaaaggcgtgcttttagtcgggcctccgggtaccggtaaaacattgcttgccaaggcttgtgcgggagaagccggcgtacctttcttcagcatcagcggatctgatttcgttgaaatgtttgtaggggtcggtgcttcccgtgtgcgtgacttgtttgaaaatgcgaaaaagaatgcgccttgtttgatcttcattgatgaaattgacgcagtcggacgccagcgtggcgctggtctcggcggtggacacgatgaacgtgaacagacgctaaaccaattgcttgttgaaatggacggattcagcgctaatgaaggaattatcatcattgctgcgacgaaccgtgcggacatcttggacccagccttacttcgtccgggacgttttgaccgtcaaatcacagtggaccgcccagatgtcattggccgtgaagctgtattgaaagtccatgcgagaaacaaaccgctggatgaaacggttaacctaaaatcaattgccatgagaacaccaggcttctcgggcgctgacttagaaaacctcttgaatgaagctgcgcttgtagcagctcgtcaaaacaagaaaaaaatcgatgcgcgtgatattgacgaagcgacggaccgtgtaattgccggacccgctaagaagagccgcgttatctccaagaaagaacgcaatatcgtggcttatcacgaaggcggacacaccgttatcggtctcgttttagatgaggcagatatggttcataaagtaacgattgttcctcggggccaggctggcggttatgctgttatgctcccaagagaagaccgttatttccaaacaaagccggagctgcttgataaaattgtcggcctcttgggcggacgtgttgctgaagagattatcttcggtgaagtcagcacaggggcgcacaatgacttccagcgtgcgacgaatattgcaagacgaatggttacggaattcggtatgtcagaaaaactgggaccgttgcaatttggacagtctcagggcggtcaggtattcttaggccgtgatttcaacaacgaacagaactacagtgatcaaatcgcttacgaaattgatcaggaaattcagcgcatcatcaaagaatgttatgagcgtgcgaaacaaatcctgactgaaaatcgtgacaagcttgaattgattgcccaaacgcttctgaaagttgaaacacttgacgctgaacaaatcaaacaccttgtcgatcatggaacattacctgagcgtaatttctcagaagatgaaaagaacgatgatgtgaaagtaaacattctgacaaaaacagaagaaaagaaagacgatacgaaagagtaattcgctttctttctaaataaactgccggctgacgctggcagtttttttatgtaaatgatgggctcagctgcggcttttacaatcatccaaatctggtatcgatttgtttacaaatgagccgctgatcgtgtatggtattgtagaatgtttgtaaaagtaaagtagagaaactattcaaaagtggtgatagaggttgttactggttatcgatgtggggaacaccaatactgtacttggtgtatatcatgatggaaaattagaatatcactggcgtatagaaacaagcaggcataaaacagaagatgagtttgggatgattttgcgctccttatttgatcactccgggcttatgtttgaacagatagatggcattattatttcgtcagtagtgccgccaatcatgtttgcgttagaaagaatgtgcacaaaatactttcatatcgagccgcaaattgttggtccaggtatgaaaaccggtttaaatataaaatatgacaatccgaaagaagtgggggcagacagaatcgtaaatgctgtcgctgcgatacacttatacggcaatccattaattgttgtcgatttcggaaccgccacaacgtactgctatattgatgaaaacaaacaatacatgggcggggcgattgcccctgggattacaatttcgacagaggcgctttactcgcgtgcagcaaagcttccgcgtatcgaaatcacccggcccgacaatattatcggaaaaaacactgttagcgcgatgcaatctgggattttatttggctatgtcggccaagtggaaggaatcgttaagcgaatgaaatggcaggcaaaacaggaaccaaaggtcattgcgacaggaggcctggcgccgctcattgcgaacgaatcagattgtatagacatcgttgatccattcttaaccctaaaagggctggaattgatttatgaaagaaaccgcgtaggaagtgtataggaggtttagtaatggattatttagtaaaagcacttgcgtatgacggaaaagttcgggcttatgcggcgagaacgactgatatggtaaatgaggggcagagacgccatggtacgtggccgacagcatccgctgcattgggccgcacaatgacagcttcacttatgctcggcgctatgctgaagggcgatgataagctgaccgtgaaaatcgagggcggaggtccaatcggagctattgtagctgatgccaatgccaaaggagaagtcagagcctatgtctctaacccgcaagttcattttgatttaaatgaacaaggaaagcttgatgtcagacgtgcggttggaacaaacggaacgttaagtgtcgtaaaagatttaggtttgcgcgagttcttcacaggacaagtagaaatcgtttcaggagaattaggagatgatttcacttactatcttgtatcatctgagcaggttccttcatcagtgggcgtaggtgtgctcgtgaatcctgacaataccattcttgcggcagggggctttattattcagctgatgccgggaacagatgatgaaacaatcacaaaaattgaacagcgtctatctcaagtagagccgatttctaagctcatccaaaaagggctgacaccagaagaaattttagaagaagtcctaggcgagaaacctgagattttggaaacgatgcctgtcagattccattgcccttgttcaaaagaacggttcgaaacagccattttaggactaggcaaaaaagaaattcaagatatgatagaagaagatggacaagccgaagcagtatgccatttttgtaatgaaaagtacttatttacaaaagaagagctggaagagcttcgtgaccaaactacccgctaagctctttagcgggtttttaatttgagaaaaggggctgaaagcaggtttgaaatcaagaacaatctggaccattattttaggggcgctgttggtttgctgtattgctgttgcatatacgctgacgaaatcccaagctggcgcatcgtcatccggtgagtctattgcgactatcggaggcaagagtgtgacaagagaagaatggctgaaagaaatggaagatcagtatggtaagtcaacgcttgaagatatgatcaatgtccgagttgttgagcagctggctaaaaagaacaaccttaaaatatccaaaagcgaagttgatcgtgagtttttgctgattaaagcggtcaataattccttttacgaagatgaacatacgacggagaaagagtggaaagaccaaattcgttataatatcctccttgaggaattgttaacaagggatatcgatatctcaaacaaagaattggaatcattctataataaaaataaggaactatatcagtttgatgattcgtatcgaattcggcacattgttgtaaaagatgaagaagaagcgagagaagtcctgaaagaactgaaaggcggatcaagctttgaagctgtcgctgccgaaagatctacagacagatatacatcaccatacggcggagatttaggttttgtcacagaggcatcagacaacattccatcagcatacattgaagaggcgaaaacactcaaagaggatgaatggtctcaggaaccaataaaggtcagcaacggatatgccattatccaactgaaagaaaaactaaaggcaagaacgttctcatttgatgaagtaaagggccagatcagacggcaaatcgcaatggatcagctaggtgataaagcgacagttaagacactttggaaagaagctgatgtatcttggttttatggggaaaaaagtactaagtgattgacaaaaaattttgaaattgatagattatatacataataccaatacaaatagtcggaaattgaggtgtcgagaatggtacgtgtagcaaactccattactgaattaattgggaatacgccaatcgttaaattaaatcgccttgcagatgaaaacagtgcggatgtatatctaaaacttgaatacatgaaccctggaagcagtgtaaaagaccgtatcggtttagccatgattgaagcggctgaaaaagaaggaaaattaaaagccggtgatacaatcattgaaccgacaagcggaaatactggaatcgggcttgcaatggttgctgctgctaaaggattaaaagccattttggttatgcctgatacaatgagcatggagcgccgcaaccttcttcgcgcatacggtgctgagcttgtgctgactcctggtgcggaaggcatgaaaggtgccattaagaaagctgaagagcttgctgaaaagcacggatactttgtgccgcagcagtttaacaacccttctaaccccgaaattcaccgccaaacaacgggtaaagaaatcgttgagcaattcggtgatgaccagcttgacgcatttgtagccggaatcggaacgggcggaacgattacgggagcgggcgaagtgctgaaggaagcatacccttccatcaagatttatgctgttgaaccgtcagattccccagtgctttcaggaggaaaaccaggcccccacaaaattcagggaatcggagcgggattcgtgccggacatcttaaacactgaagtatatgatgaaatcttccctgtgaagaatgaagaagcattcgaatatgcccgcagagctgcacgtgaagaaggaattctcggaggcatctcatcaggtgcggcaatttatgctgctcttcaagtagcaaaaaaactcggaaaaggcaaaaaagtattggccatcattccaagtaacggcgaacgttatctaagcacgccgctgtatcaattcgattaaaaaaagccaaaactcccggtccgccgggagtttttttatatttcgtgcatcaaatatgccatgtctgcgacgaatgttattcttggaagagaaattcacttttttcactaacaacattgctttacaattaaaaacaagtaaaaaagaaaatagaggaatgatacaaatggcacaacgcagaccggcaggcaaaaaaataccttttcaaaaagactcattcttacaacaatttgagaaacttgcgcaatcccggaaacatcatgtacttctcgaaagtgcaagaggcggcagatacagtatagccggtcttgatccaattgcgactgtgaaaggaaaagacggaataactacaattaagcatggtgatgagatgctgtttaaagaaggtgatccattacgggccttccacagctggtttaaaacgctggaaacagaaacaaatcatgagttccctgactttcaaggcggggcaatcgggtttctcagctatgattacgcacggtacattgaaaattttaaaatgctctcattagatgatctagaaacaccagatatttattttcttgtttttgatgatatagcagtttatgaccatcaagaagagtctctatggctgattactcatgttaatggttctgatcaggaaacagcgaatgtgaagctatctgagttagagcagatgtggctgactgagcttcccgctgtctcttcgcgagagatgaaccctgaaacagatggttctttcgcggcgccatttaccgaggatgggttctcgcaagctgtagagaaaatcaaacaatacattgccagcggagatgtgtttcaagtcaatctatcaataaggcagtcacagtcactgtctgcccacccatatcaaatttacaaaaccttgagagaagtaaatccttctccttatatggcgtatttagaaacacctgatttccaaatcatttgcggctcgcctgaactgcttgtcagcaaaaagggcaagctattagagacgagaccgattgcgggcacccgttccagagggaaaacaaatgaagaagacgaggtgcttgcaaacgaattgatacacaatgaaaaagaacgcgcggaacatgtcatgctggttgatcttgagcgaaatgatctgggaagagtatcacggtacgggtctgtgcgcgtaaatgaattcatggcaattgaaaaatactcgcatgtgatgcacattgtgtctaatgtccaaggtgaactgcaggatgggtatgatgctgtagatattattcatgctgtattccccggaggaaccattactggtgcaccgaaagtaagaacgatggaaattatagaagaacttgagccgacacgccgagggctttatactggatctataggatggtttggatataatcacgatctgcagtttaatatcgtcattcgaaccatttatgcaaccggagggcaggcatttatgcagtccggcgcaggagttgtgattgattctgttccgaagcacgaatacaaggaatcattcaaaaaagcttttgcgatgcaaagagcattagagctgagcaaagaagagacaaaaattagatgaggtgagcggagaaatgattttaatgattgataactacgattcattcacgtacaacttggtacagtatttgggcgagcttggggaagagctggttgtgaaacgcaatgacagcatcacaatcgaagaaattgaagaactgtctccggactttctgatgatatctcccggaccgtgcagccctgatgaggcgggaatcagcctcgaagcgattaaacatttcgcagggaaaattcctattttcggtgtatgtctcggacaccagtccatcgcacaagtgttcggtggtgacgttgttagggcagaacggcttatgcacgggaaaacctcggatatcgagcatgacggcaagaccatttttgaagggttgaaaaacccccttgttgcgacgcgataccactcgctgatcgtaaaacctgagacgctgccaagctgttttacagtaacagcacaaacgaaagaaggagaaatcatggctattcgccacaatgacctcccgatagagggcgtgcaatttcacccagagtctattatgacctcctttgggaaagaaatgctcagaaattttattgaaacatatcgcaaggaagttattgcgtgatgatatatgtgaacggccggtatatggaggagaaagatgcagttctttctccttttgaccatgggtttttatatgggatcggtgttttcgaaaccttcaggctctacgaaggctgtccgtttttgcttgattggcatatagaaaggcttgaacgcgcgcttaaggatctgcaaatcgaatatactgtttcaaagcatgagatccttgagatgctggacaagctgcttaagctaaatgatatcaaggatggcaatgcccgcgtcagactgaacatatcagcggggatcagcgataaaggctttgtcgcccagacgtatgataagccgaccgttttatgctttgtgaatcagctgaaaccagaaagccttcctttgcaaaaagaagggaaggttttatcgatacggagaaacactcctgagggatcgttccggttaaaatctcatcattatctaaataatatgtatgcgaaacgggaaattggaaatgatccacgtgtcgagggaattttcctaacggaggatggagctgttgcagagggtatcatatctaatgtcttctggagaaaaggtcgctgtatctatacgccatcgcttgatactggtattctggacggcgtcacgagacgttttatcatagaaaatgcaaagaatatcggcctggagctcaaaacgggccgatatgagccagaagctctcttgacagctgacgaagcgtggatgacgaactcggttcttgaaatcatcccgtttactaaaatagaagaagtaaactatggaagccaaagcggagaagcaacctccgctcttcaattgttatacaaaaaagaaataaagaacatgattcatgaaaagggaggaagagcatggcgcagcacacaatagatcaaacacaagtaatccacactaagcccagcgctttatcatataaagagaagacgctggtgatgggaattttaaacgtaacgcctgactctttctcggacggcggaaaatatgacagcttagacaaggcgctgctgcacgcggaagagatgatcaatgatggtgcccatatcattgatatcggaggggaatcgacaaggcctggcgctgagtgcgtatctgaggatgaggagatgtccagagtcattccggtgattgagcggattacgaaagagcttggtgttcctatttctgtagatacgtacaaggcttctgtcgcagatgaagcagtgaaagccggcgcatccattatcaatgatatttggggtgctaaacatgatccgaagatggcttccgttgcagctgaacataatgttccaattgttctcatgcataaccgccctgaaagaaactacaatgacttattgccggatatgctgtcggacttaatggagagtgtaaaaattgctgttgatgccggagtagacgagaagaacattattcttgatcccggtatcggtttcgcgaaaacctatcacgataacttggcagtgatgaacaaactagagattttcagcgggctggggtatccggttcttctggcaacctcccgaaaaagattcatcggacgtgttctggatcttccgcctgaggagcgggctgagggcacaggcgcgactgtgtgtctcggcattcaaaaaggctgtgacattgtcagggtccatgatgtaaagcaaattgccagaatggcgaaaatgatggacgcgatgctgaataagggaggggtgcaccatggataaagtttatgtagaaggtatggagttttacggatatcacggtgtgttcaaagaagaaaacaaacttggccagcggtttaaagtcgatttaaccgctgagctggatttaagcaaagctggacaaacagacgaccttgagcaaacgatcaactatgctgagctctatcacgtatgtaaagatatcgtggaaggggagcctgtaaaattggtagaaacgctggcggaacgtattgctggcactgttctcgaaaaatttcagcctgttcagcaatgtacggtgaaagtgattaagccagacccgccaattcccggacactataaatcagtagcaattgaaattacgagaaaaaagtcatgaacaacatagcttatattgcacttggatctaatattggagatagagaaacgtatttaaggcaagcagtggcttcactgcatcagcatgctgcggtgacagtcactaaagtgtcgtctatttacgaaactgacccggtcggatacgaagatcaagctcaatttttgaatatggctgttgaaatcaagacatcattgaacccttttgaactccttgaactgacgcagcagatagaaaatgaattaggcagaacaagggaagtaagatgggggccgcggacggcagaccttgacattttgttatttaatcgtgaaaatattgaaacagagcaactaattgttccgcatccgagaatgtatgagcgtttgtttgtccttgcgccgcttgcggaaatttgccagcaggttgaaaaagaggctacaagcgccgaaacagaccaagaaggtgtaagagtatggaagcagaaatctggggtagacgaattcgtgcattcagaaagctgaaaggttatactcaagaaggatttgcaaaagcattaggtatatcagtttctattctcggcgaaattgaacgcggaaaccgattgccgtcagctgccataattcaagatgcagcagatgttttaaatataagtgcggacgaattggcgccgccagaaaaatagaacaaatgaaaggaggagaaaaattgttcaaaatcggagatattcaattgaaaaaccgggttgtgctcgcacctatggctggtgtctgcaactctgcgttcagattgactgtaaaggaattcggagccggattggtatgcgctgaaatggtcagtgacaaagcgatcctttacaacaatgcaagaacaatgggtatgctttatatcgatgaacgtgagaaaccactcagccttcaaattttcggaggaaaaaaggaaacccttgtggaagcggcgaagtttgtagaccaaaacacaactgctgatatcattgacattaacatgggatgtcccgtgccgaagattacaaaatgcgatgcgggagccaaatggcttctcgatcctgataagatttacgaaatggtttctgcagtagtggatgctgttaataaaccagttacagtgaaaatgagaatgggctgggatgaagaccacattttcgcagtgaaaaatgcacaggctgtagaacgtgcgggtggtaaagcagttgcgcttcacggccgtacgagagtgcagatgtacgaaggaacggcaaactgggatatcatcaaagaagtaaaacaatcagtatcgattccggttatcggaaacggcgatgttaagacaccgcaggatgctaagcgtatgctcgatgagacaggagtagacggggtcatgatcggacgcgctgcattgggcaacccgtggatgatttaccgtacggttcagtatcttgaaacaggtgaattaaaagaagagccgcaagtacgcgaaaaaatggccgtatgcaaactgcatcttgaccgcctgattgacttaaaaggtgaaaacgtagcggtaagagaaatgagaaagcacgctgcatggtatctgaaaggcgtgaaaggcaatgcgaacgttcgtaatgaaatcaatcattgcgagacgagagaagagtttgtacagcttttagatgcatttacggttgaagttgaggcaaaagagcttcaaaatgcaaaagtaggataatactcacctctatttgctgctcactgctagttttacgctggcagtttttctgcttttttcatgaaacaatatctgtaatggagtgataacaatgagtcaagaagagcataaccatgaagaattgaatgatcagctgcaagtcagacgcgataaaatgaatcagctgagagataacggcatcgatccattcggcgcacgttttgaaagaactcatcagtctcaagaagttatttcggcatatcaagatctaaccaaagaagagttggaagaaaaagcgattgaagttacaatcgcaggccgcatgatgacaaaacgcggcaaaggaaaagccggctttgcccatcttcaggatttagaaggccaaatccaaatctacgtaagaaaagacagtgtcggtgacgaccaatatgaaatcttcaagtcttctgacctcggtgatcttatcggcgtaaccggaaaagtcttcaaaacaaatgtaggcgaattgtctgttaaagcaacttcctttgaattgctgacaaaagcgcttcgtccgcttcctgacaaataccatggtttaaaagacgttgagcagcgctaccgtcagcgctacctggatcttatcgtaaacccagacagcaaacatacgtttattacacgaagcaagatcattcaagctatgagaagataccttgatgatcatggatacttagaagtagaaacacctacaatgcacagcattcctgggggagcttctgcacgtccgtttatcactcaccacaacgcgttagacattccactctatatgcgtattgctatcgaactgcacctaaaacgtctaattgtcggcggtttagaaaaagtatatgaaatcggccgtgttttccgtaacgaaggtgtctctacacgccataaccctgaatttacaatgattgagttatatgaagcatatgcggactataaagatatcatgagcttaactgaaaaccttgtcgctcatatcgcccaagaagtgcttggcacaactacgattcaatacggggaagagcaaatcgaccttaaaccggagtggaaaagaatccatatggttgacgcagtcaaagaagcgaccggcgttgatttctgggaagaggttactgttgaacaggcgcgtgaatatgcaaaagaacatggagtagaaattaaagactctatgacagtaggccatatcatcaacgaattcttcgaacaaaaaattgaagaaacgcttattcagccaacgtttatttacgggcatcctgtagaaatttctcctcttgctaagaaaaaccctgaggacccgcgttttacagaccgttttgagctgtttatcgttggccgtgaacatgccaacgcgtttacagagctgaatgatcctattgatcaaagagaacgctttgaagcgcaattaaaagagcgtgaagccggtaatgatgaagctcatctaatggatgaagactttgttgaagctctggaatacggtatgccgccaacaggaggtttaggcatcggtatcgaccgtctggttatgctgctgacgaatgccccttctattcgcgatgtgctgttattcccgcaaatgagacaacgctaataaagaagagcggtatcctccatagagaaaggatgccgctctttttaaattccttagtatttcttcaaaaaaactattgcactattatttactaggtggtatattattattcgttgccgctaaacaaggcgataacgaaaaaataacttaaaaaaagttattgacttcactgagtcaacgagttataataataaagtcgcttgaacgaagtgaacaaaatgatctttgaaaactaaacaagacaaaacgtacctgttaattcagtttttaaaaatcgcacagcgatgtgcgtagtcagtcaaactactttatcggagagtttgatcctggctcaggacgaacgctggcggcgtgcctaatacatgcaagtcgagcggacagatgggagcttgctccctgatgttagcggcggacgggtgagtaacacgtgggtaacctgcctgtaagactgggataactccgggaaaccggggctaataccggatggttgtttgaaccgcatggttcaaacataaaaggtggcttcggctaccacttacagatggacccgcggcgcattagctagttggtgaggtaacggctcaccaaggcgacgatgcgtagccgacctgagagggtgatcggccacactgggactgagacacggcccagactcctacgggaggcagcagtagggaatcttccgcaatggacgaaagtctgacggagcaacgccgcgtgagtgatgaaggttttcggatcgtaaagctctgttgttagggaagaacaagtaccgttcgaatagggcggtaccttgacggtacctaaccagaaagccacggctaactacgtgccagcagccgcggtaatacgtaggtggcaagcgttgtccggaattattgggcgtaaagggctcgcaggcggtttcttaagtctgatgtgaaagcccccggctcaaccggggagggtcattggaaactggggaacttgagtgcagaagaggagagtggaattccacgtgtagcggtgaaatgcgtagagatgtggaggaacaccagtggcgaaggcgactctctggtctgtaactgacgctgaggagcgaaagcgtggggagcgaacaggattagataccctggtagtccacgccgtaaacgatgagtgctaagtgttagggggtttccgccccttagtgctgcagctaacgcattaagcactccgcctggggagtacggtcgcaagactgaaactcaaaggaattgacgggggcccgcacaagcggtggagcatgtggtttaattcgaagcaacgcgaagaaccttaccaggtcttgacatcctctgacaatcctagagataggacgtccccttcgggggcagagtgacaggtggtgcatggttgtcgtcagctcgtgtcgtgagatgttgggttaagtcccgcaacgagcgcaacccttgatcttagttgccagcattcagttgggcactctaaggtgactgccggtgacaaaccggaggaaggtggggatgacgtcaaatcatcatgccccttatgacctgggctacacacgtgctacaatggacagaacaaagggcagcgaaaccgcgaggttaagccaatcccacaaatctgttctcagttcggatcgcagtctgcaactcgactgcgtgaagctggaatcgctagtaatcgcggatcagcatgccgcggtgaatacgttcccgggccttgtacacaccgcccgtcacaccacgagagtttgtaacacccgaagtcggtgaggtaaccttttaggagccagccgccgaaggtgggacagatgattggggtgaagtcgtaacaaggtagccgtatcggaaggtgcggctggatcacctcctttctaaggatattatacggaatataagaccttgggtcttataaacagaacgttccctgtcttgtttagttttgaaggatcattccttcgaaacgtgttctttgaaaactagataacagtagacatcacattcaattagtaatacaagatatcacatagtgattctttttaacggttaagttagaaagggcgcacggtggatgccttggcactaggagccgatgaaggacgggacgaacaccgatatgcttcggggagctgtaagcaagctttgatccggagatttccgaatggggaaacccaccactcgtaatggagtggtatccatatctgaattcataggatatgagaaggcagacccggggaactgaaacatctaagtacccggaggaagagaaagcaaatgcgattccctgagtagcggcgagcgaaacgggattagcccaaaccaagaggcttgcctcttggggttgtaggacactctgtacggagttacaaaagaacgaggtagatgaagaggtctggaaaggcccgccataggaggtaacagccctgtagtcaaaacttcgttctctcctgagtggatcctgagtacggcggaacacgtgaaattccgtcggaatccgggaggaccatctcccaaggctaaatactccctagtgaccgatagtgaaccagtaccgtgagggaaaggtgaaaagcaccccggaaggggagtgaaagagatcctgaaaccgtgtgcctacaagtagtcagagcccgttaacgggtgatggcgtgccttttgtagaatgaaccggcgagttacgatcccgtgcaaggttaagcagaagatgcggagccgcagcgaaagcgagtctgaatagggcgcatgagtacgtggtcgtagacccgaaaccaggtgatctacccatgtccagggtgaagttcaggtaacactgaatggaggcccgaacccacgcacgttgaaaagtgcggggatgaggtgtgggtaggggtgaaatgccaatcgaacctggagatagctggttctctccgaaatagctttagggctagcctcaaggtaagagtcttggaggtagagcactgattggactaggggcccctaccgggttaccgaattcagtcaaactccgaatgccaatgacttatccttgggagtcagactgcgagtgataagatccgtagtcgaaagggaaacagcccagaccgccagctaaggtcccaaagtatacgttaagtggaaaaggatgtggagttgcttagacaaccaggatgttggcttagaagcagccaccatttaaagagtgcgtaatagctcactggtcgagtgactctgcgccgaaaatgtaccggggctaaacgtatcaccgaagctgcggactgttcttcgaacagtggtaggagagcgttctaagggctgtgaagccagaccggaaggactggtggagcgcttagaagtgagaatgccggtatgagtagcgaaagaggggtgagaatcccctccaccgaatgcctaaggtttcctgaggaaggctcgtccgctcagggttagtcgggacctaagccgaggccgaaaggcgtaggcgatggacaacaggttgatattcctgtaccacctcctcaccatttgagcaatggggggacgcaggaggatagggtaagcgcggtattggatatccgcgtccaagcagttaggctgggaaataggcaaatccgtttcccataaggctgagctgtgatggcgagcgaaatatagtagcgaagttcctgattccacactgccaagaaaagcctctagcgaggtgagaggtgcccgtaccgcaaaccgacacaggtaggcgaggagagaatcctaaggtgatcgagagaactctcgttaaggaactcggcaaaatgaccccgtaacttcgggagaaggggtgctctgttagggtgcaagcccgagagagccgcagtgaataggcccaggcgactgtttagcaaaaacacaggtctctgcgaagccgtaaggcgaagtataggggctgacgcctgcccggtgctggaaggttaagaggagcgcttagcgtaagcgaaggtgcgaattgaagccccagtaaacggcggccgtaactataacggtcctaaggtagcgaaattccttgtcgggtaagttccgacccgcacgaaaggcgcaacgatctgggcactgtctcaacgagagactcggtgaaattatagtacctgtgaagatgcaggttacccgcgacaggacggaaagaccccgtggagctttactgcagcctgatattgaatgttggtacagcttgtacaggataggtaggagccttggaaaccggagcgccagcttcggtggaggcatcggtgggatactaccctggctgtattgaccttctaacccgccgcccttatcgggcggggagacagtgtcaggtgggcagtttgactggggcggtcgcctcctaaaaggtaacggaggcgcccaaaggttccctcagaatggttggaaatcattcgcagagtgtaaaggcacaagggagcttgactgcgagacctacaagtcgagcagggacgaaagtcgggcttagtgatccggtggttccgcatggaagggccatcgctcaacggataaaagctaccccggggataacaggcttatctcccccaagagtccacatcgacggggaggtttggcacctcgatgtcggctcatcgcatcctggggctgtagtcggtcccaagggttgggctgttcgcccattaaagcggtacgcgagctgggttcagaacgtcgtgagacagttcggtccctatccgtcgcgggcgcaggaaatttgagaggagctgtccttagtacgagaggaccgggatggacgcaccgctggtgtaccagttgttctgccaagggcatcgctgggtagctatgtgcggacgggataagtgctgaaagcatctaagcatgaagcccccctcaagatgagatttcccattccgcaaggaagtaagatccctgaaagatgatcaggttgataggtctgaggtggaagtgtggcgacacatggagctgacagatactaatcgatcgaggacttaaccatatttttgaatgatgtcacatctgttatctagttttgagagaacactctcaatttgtttggtggcgatagcgaagaggtcacacccgttcccataccgaacacggaagttaagctcttcagcgccgatggtagtcggggggttccccctgtgagagtaggacgccgccaagcaattgcacgttagtgcaattatggaggattagctcagctgggagagcatctgccttacaagcagagggtcggcggttcgagcccgtcatcctccaccattatgccggtgtagctcaattggtagagcaactgacttgtaatcagtaggttgggggttcaagtcctcttgccggcaccacttttatatgatataatactcaagtctcttgtagaagagccattagctcagttggtagagcatctgacttttaatcagagggtcgaaggttcgagtccttcatggctcaccattttacgcgggtgtggcggaattggcagacgcgctagacttaggatctagtgtctttatgacgtgggggttcaagtcccttcacccgcattatataggataacagttagaaaaactggacatcctgtctgcggaagtagttcagtggtagaacaccaccttgccaaggtgggggtcgcgggttcgaatcccgtcttccgctccaactataccatccacgccggggtggtggaattggcagacacacaggacttaaaatcctgcggtaggtgactaccgtgccggttcaagtccggccctcggcattatgttttgcgcccgtagctcaattggatagagcgtttgactacggatcaaaaggttaggggttcgactcctctcgggcgcgccatattttttaatagaatagatgggaaatcgggaagtagctcagcttggtagagcacatggtttgggaccatggggtcgcaggttcgaatcctgtcttcccgaccattttttatggggccttagctcagctgggagagcgcctgctttgcacgcaggaggtcagcggttcgatcccgctaggctccaccaaaagttttttaaaaaagttgttgactttgaagaagtgacgttgtataatgataaagttgctttaacaaagcagacaaacaaaatgatctttgaaaactaaacaagacaaaacgtacctgttaattcagtttttaaaaatcgcacagtgatgtgcgtagtcagtcaaactactttatcggagagtttgatcctggctcaggacgaacgctggcggcgtgcctaatacatgcaagtcgagcggacagatgggagcttgctccctgatgttagcggcggacgggtgagtaacacgtgggtaacctgcctgtaagactgggataactccgggaaaccggggctaataccggatggttgtttgaaccgcatggttcaaacataaaaggtggcttcggctaccacttacagatggacccgcggcgcattagctagttggtgaggtaacggctcaccaaggcaacgatgcgtagccgacctgagagggtgatcggccacactgggactgagacacggcccagactcctacgggaggcagcagtagggaatcttccgcaatggacgaaagtctgacggagcaacgccgcgtgagtgatgaaggttttcggatcgtaaagctctgttgttagggaagaacaagtaccgttcgaatagggcggtaccttgacggtacctaaccagaaagccacggctaactacgtgccagcagccgcggtaatacgtaggtggcaagcgttgtccggaattattgggcgtaaagggctcgcaggcggtttcttaagtctgatgtgaaagcccccggctcaaccggggagggtcattggaaactggggaacttgagtgcagaagaggagagtggaattccacgtgtagcggtgaaatgcgtagagatgtggaggaacaccagtggcgaaggcgactctctggtctgtaactgacgctgaggagcgaaagcgtggggagcgaacaggattagataccctggtagtccacgccgtaaacgatgagtgctaagtgttagggggtttccgccccttagtgctgcagctaacgcattaagcactccgcctggggagtacggtcgcaagactgaaactcaaaggaattgacgggggcccgcacaagcggtggagcatgtggtttaattcgaagcaacgcgaagaaccttaccaggtcttgacatcctctgacaatcctagagataggacgtccccttcgggggcagagtgacaggtggtgcatggttgtcgtcagctcgtgtcgtgagatgttgggttaagtcccgcaacgagcgcaacccttgatcttagttgccagcattcagttgggcactctaaggtgactgccggtgacaaaccggaggaaggtggggatgacgtcaaatcatcatgccccttatgacctgggctacacacgtgctacaatggacagaacaaagggcagcgaaaccgcgaggttaagccaatcccacaaatctgttctcagttcggatcgcagtctgcaactcgactgcgtgaagctggaatcgctagtaatcgcggatcagcatgccgcggtgaatacgttcccgggccttgtacacaccgcccgtcacaccacgagagtttgtaacacccgaagtcggtgaggtaaccttttaggagccagccgccgaaggtgggacagatgattggggtgaagtcgtaacaaggtagccgtatcggaaggtgcggctggatcacctcctttctaaggatattatacggaatataagaccttgggtcttataaacagaacgttccctgtcttgtttagttttgaaggatcattccttcgaaacgtgttctttgaaaactagataacagtagacatcacattcaattagtaatacaagatatcacatagtgattctttttaacggttaagttagaaagggcgcacggtggatgccttggcactaggagccgatgaaggacgggacgaacaccgatatgcttcggggagctgtaagcaagctttgatccggagatttccgaatggggaaacccaccactcgtaatggagtggtatccatatctgaattcataggatatgagaaggcagacccggggaactgaaacatctaagtacccggaggaagagaaagcaaatgcgattccctgagtagcggcgagcgaaacgggattagcccaaaccaagaggcttgcctcttggggttgtaggacactctgtacggagttacaaaagaacgaggtagatgaagaggtctggaaaggcccgccataggaggtaacagccctgtagtcaaaacttcgttctctcctgagtggatcctgagtacggcggaacacgtgaaattccgtcggaatccgggaggaccatctcccaaggctaaatactccctagtgaccgatagtgaaccagtaccgtgagggaaaggtgaaaagcaccccggaaggggagtgaaagagatcctgaaaccgtgtgcctacaagtagtcagagcccgttaacgggtgatggcgtgccttttgtagaatgaaccggcgagttacgatcccgtgcaaggttaagcagaagatgcggagccgcagcgaaagcgagtctgaatagggcgcatgagtacgtggtcgtagacccgaaaccaggtgatctacccatgtccagggtgaagttcaggtaacactgaatggaggcccgaacccacgcacgttgaaaagtgcggggatgaggtgtgggtaggggtgaaatgccaatcgaacctggagatagctggttctctccgaaatagctttagggctagcctcaaggtaagagtcttggaggtagagcactgattggactaggggcccctaccgggttaccgaattcagtcaaactccgaatgccaatgacttatccttgggagtcagactgcgagtgataagatccgtagtcgaaagggaaacagcccagaccgccagctaaggtcccaaagtatacgttaagtggaaaaggatgtggagttgcttagacaaccaggatgttggcttagaagcagccaccatttaaagagtgcgtaatagctcactggtcgagtgactctgcgccgaaaatgtaccggggctaaacgtatcaccgaagctgcggactgttcttcgaacagtggtaggagagcgttctaagggctgtgaagccagaccggaaggactggtggagcgcttagaagtgagaatgccggtatgagtagcgaaagaggggtgagaatcccctccaccgaatgcctaaggtttcctgaggaaggctcgtccgctcagggttagtcgggacctaagccgaggccgaaaggcgtaggcgatggacaacaggttgatattcctgtaccacctcctcaccatttgagcaatggggggacgcaggaggatagggtaagcgcggtattggatatccgcgtccaagcagttaggctgggaaataggcaaatccgtttcccataaggctgagctgtgatggcgagcgaaatatagtagcgaagttcctgattccacactgccaagaaaagcctctagcgaggtgagaggtgcccgtaccgcaaaccgacacaggtaggcgaggagagaatcctaaggtgatcgagagaactctcgttaaggaactcggcaaaatgaccccgtaacttcgggagaaggggtgctctgttagggtgcaagcccgagagagccgcagtgaataggcccaggcgactgtttagcaaaaacacaggtctctgcgaagccgtaaggcgaagtataggggctgacgcctgcccggtgctggaaggttaagaggagcgcttagcgtaagcgaaggtgcgaattgaagccccagtaaacggcggccgtaactataacggtcctaaggtagcgaaattccttgtcgggtaagttccgacccgcacgaaaggcgcaacgatctgggcactgtctcaacgagagactcggtgaaattatagtacctgtgaagatgcaggttacccgcgacaggacggaaagaccccgtggagctttactgcagcctgatattgaatgttggtacagcttgtacaggataggtaggagccttggaaaccggagcgccagcttcggtggaggcatcggtgggatactaccctggctgtattgaccttctaacccgccgcccttatcgggcggggagacagtgtcaggtgggcagtttgactggggcggtcgcctcctaaaaggtaacggaggcgcccaaaggttccctcagaatggttggaaatcattcgcagagtgtaaaggcacaagggagcttgactgcgagacctacaagtcgagcagggacgaaagtcgggcttagtgatccggtggttccgcatggaagggccatcgctcaacggataaaagctaccccggggataacaggcttatctcccccaagagtccacatcgacggggaggtttggcacctcgatgtcggctcatcgcatcctggggctgtagtcggtcccaagggttgggctgttcgcccattaaagcggtacgcgagctgggttcagaacgtcgtgagacagttcggtccctatccgtcgcgggcgcaggaaatttgagaggagctgtccttagtacgagaggaccgggatggacgcaccgctggtgtaccagttgttctgccaagggcatcgctgggtagctatgtgcggacgggataagtgctgaaagcatctaagcatgaagcccccctcaagatgagatttcccattccgcaaggaagtaagatccctgaaagatgatcaggttgataggtctgaggtggaagtgtggcgacacatggagctgacagatactaatcgatcgaggacttaaccatatttttgaatgatgtcacatctgttatctagttttgagagaacactctcaatttgtttggtggcgatagcgaagaggtcacacccgttcccataccgaacacggaagttaagctcttcagcgccgatggtagtcgggggtttccccctgtgagagtaggacgccgccaagcaagcttaaacccagctcaatgagctgggttttttgtattttggtttattggtatcataaaattccacttaactgtataatataataactttataccgaattttaaatcagcaatcaggttttgtggaccgggaaaatggaaataatgaaggatagagcgagaaagttgaaaattctcgagaaacggcttatagtaagattaaagtcaaatatagtcaaagtcagtaaaggagggggttgagtgggacataatatttctgacatcattgaacaatatttaaaacgagtgttagatcaaaatggcaaggaaattttagagattaaacgaagtgaaattgcagataaatttcaatgcgttccttcccaaataaattatgtcatcaacaccagatttacaagcgaaagaggatatattgttgagagcaaacgcgggggtggcggttatatcagaatcattaaaattaaaatgaacaatgaagttgtcctgatcaataatattatttctcaaattaatacccatttgtctcaagcagcctctgatgacattattttaaggctattagaagacaaggtaatttcagaaagagaagcaaaaatgatggtcagcgtaatggaccgctcagttttacacattgacttgcctgaacgtgatgaattaagagcgagaatgatgaaggcaatgctgacttctttaaaattaaaataagcgggtgaaaagattgatttgtcaagagtgccacgagagaccagccacttttcactttacaaaggttgttaacggagaaaaaatagaagttcatatttgtgaacaatgtgccaaagaaaatagtgattcatatggtataagtgcaaatcagggtttctctattcataatttactttcgggtttactgaacatggattcttcatttcaaaatgcaggaactcaaatgttcagtcactcggagcaaatatctgcttgtccgaaatgcggaatgacttttcagcaattcagaaaaattggccgttttggatgttctgaatgttacaaaacatttcatagcaacattacacctatcctacgtaaagtgcacagcggaaacactttgcatgcagggaagataccgaaacgaataggcggcaatcttcatgtcagacggcagattgatatgctaaaaaaggaattagaatccttaatccatcaagaagaatttgaaaatgcagctcatgtaagagatcaaattcgttcattagaacaatcactcaaaagtacagatagtgaggaggaacaggagtaatgtcgctaaagcattttattcaggacgcactaagcagttggatgaagcagaaaggacctgaaagtgacattgtactcagcagccgcatacgtttagcaaggaactttgagcatattcggttccctacgcggtattccaatgaagaagcctcatccatcatacagcaatttgaagatcagttttcagagcaagaaattcccggaatcggcaaatttgttttgattagaatgaatgatgcacagcctttagaaaagcgtgtacttgttgaaaaacatctaatcagtcctaatctgacagagtctccttttggcggctgtttgctttctgaaaatgaggaagtaagtgtcatgttaaatgaagaggaccatattagaattcagtgtcttttccctggatttcagcttttagaagcaatgaaagccgcaaaccaggtcgacgactggattgaagaaaaagttgattatgcattcaatgagcaaagaggatacttaaccagctgtcctacaaacgtaggtacaggtttaagggcttcggtcatgatgcatctgccggcactggttttaactaggcaaataaatcgaattataccggcaattaatcaattaggcttagttgttagaggaatttatggggaaggcagcgaagcagtagggaatatctttcaaatttcaaatcagatcacgcttggtaagtcagagcaggatattgtagaggatcttaacagtgttgctgctcagttgattgaacaagaacgatctgcccgagaagcgatttatcaaacttctaaaatcgaacttgaggatcgggtatatcggtcttatggggtcttgtctaattgccggatgatagaatcgaaagaaactgcaaagtgcctttcagatgttcggttaggcatagacctaggcattataaaaggactttcaagcaacatacttaacgaacttatgattttgacgcagccaggatttttacagcaatactcgggaggcgctttgcgtccgaacgaaagggacattcgaagagcggctctcatcagagaacggcttcacttagaaatgaatgggaaacgacaggaggatgaatcgatatgatgtttggaagatttacagaacgagctcaaaaagtactggcgctagcacaggaagaagcacttcggttaggtcataataacattggcactgagcatattttattaggactggtaagagaaggagagggcattgctgctaaagctcttcaagcgcttggactcggttcagataaaattcagaaagaagtagaaagtttgatcgggcgcgggcaggaaatgtctcaaacgattcattatactcctagagctaaaaaagtcattgagctttcaatggatgaggcaagaaaactcggtcattcttatgttggaacagaacatattcttcttggactgattcgtgaaggagaaggtgttgctgcgagagttttgaataatctcggtgtcagcttaaataaagcaagacagcaggtgctccagcttctaggaagtaatgaaacaggatcatcagcggcaggaacaaacagcaatgcgaatacgcctacgcttgacagcttggcaagagacttaactgctattgcgaaggaagacagccttgaccctgtaatcggcagaagcaaggagatccagcgtgtcattgaagtattaagccgcagaacgaaaaacaaccctgttctcattggggaaccaggtgtaggtaaaacggctatcgcagaaggtttggcacagcaaattatcaataatgaagtacccgaaattttgcgtgataaacgtgtgatgacattagacatgggaacagttgttgccggcacaaaatatcgcggagaatttgaggatcgcctgaagaaggtcatggatgaaattcgccaggcaggaaatatcattctattcatcgatgagctccatacattaatcggggcaggcggagcagaaggtgctattgatgcatctaatattttaaaaccttcacttgctcgcggcgaactccaatgtattggtgcaacgactcttgatgagtaccgtaaatatattgaaaaagatgcagcactggaacgccgttttcagccgattcaggttgatcagccatctgtagatgaaagtattcaaattttacaaggtctgcgtgacagatacgaagcccaccaccgcgtttctatcactgatgatgccattgaagctgcggttaagctttctgacagatatatttctgaccgcttccttccggataaagcaattgacttgatcgatgaagcaggttcaaaggtgagactgcgctcatttacaacgcctcctaacttaaaagagcttgagcagaagcttgatgaggttcgtaaagagaaggatgcggcagtgcaaagccaagagtttgaaaaagctgcttccttgcgtgatactgaacaacgcctgcgcgagcaagtagaggatacgaagaaatcatggaaagagaagcaagggcaggaaaactcagaggttactgtggatgatattgcgatggttgtatccagctggaccggtgtgcctgtatctaaaatcgcccaaactgaaactgataagcttctcaatatggaaaacattcttcattcccgcgtcatcggccaggatgaggcagttgtagctgttgcaaaagccgtcagacgtgcgagagcagggttgaaagatcctaaacgcccaatcggctcattcattttcttaggccctacaggtgtaggtaaaacagaacttgcacgagcacttgctgaatccatttttggcgatgaagaatccatgatcagaattgacatgtctgaatacatggaaaaacactcaacttcaagacttgttggttcacctccgggatatgtgggatatgatgaaggcggtcaattgacagagaaagtcagaagaaaaccttactctgtcgtgcttcttgatgagatcgagaaagcgcaccctgatgtcttcaatatccttctgcaagttcttgaagacgggcgattgactgattctaaaggacgcacagtcgatttccgcaataccattctgatcatgacatcaaacgtcggagcaagtgagctgaaacgcaataaatatgtcggctttaacgttcaggatgaaactcaaaatcataaagacatgaaagataaagtgatgggtgaattgaaacgagcgttcagacctgagttcatcaaccgtattgatgaaatcattgtcttccattcacttgagaaaaaacatcttactgaaattgtgtcattaatgtctgatcaattaacgaaacgcctgaaagaacaagatctttctatcgaattgacagatgctgcaaaagcgaaagtcgcggaagagggcgttgacctggaatacggtgcccgtccgttaagaagagcgatccaaaaacatgtcgaggatcgtttatctgaagaactcctcagaggaaatattcataaaggacagcatattgttcttgatgtagaagatggcgaatttgtcgtaaaaacgactgctaaaacgaattaatatagaagacggaaatgaggcatacagcatgtaagtgtatgcctcactttcatatcaagaaatagaacaagggagaggtcttacactatatatggctaaaacaaaatcgaaattcatctgccaatcctgcggctacgagtctccaaaatggatggggaaatgtccgggctgcggtgcttggaatacaatggtggaagaaatgattaaaaaagcaccggccaatcggagagcggctttttctcattctgttcaaactgtacagaaaccttcacctattacatcaatcgaaacatcagaagaaccccgcgtcaaaacccagcttggcgagtttaacagagtactcggcggaggtgtcgttaaaggctccctcgttttaattggcggtgatcctggtatcggaaagtcaacgctattactgcaggtttccgctcaattatcaggctcatcaaacagtgtcctgtatatttcgggagaagaatctgtaaagcaaacgaagctgcgagcagaccgtctcggcattaataatccgtcactgcatgttttatctgaaaccgatatggagtatatttcgtctgctatacaagagatgaatccagcgtttgtcgttgttgactctattcaaacggtttaccaaagcgatattacatcggctccaggcagtgtgtcacaggtcagagaatgtaccgctgagctgatgaaaattgcaaaaacaaaaggtattccgatttttatcgtagggcacgtaacgaaagaagggtctattgcaggtccaagactgttggagcatatggttgacactgttttatattttgaaggagaacgccaccatactttccgtattttgcgggctgtaaaaaaccgtttcggatctacaaacgaaatgggcattttcgaaatgcgggaagaggggctcactgaggttttgaatccttcggaaattttcttagaagaacgctctgctggttccgcaggctcgagtatcactgcctctatggagggcactagaccgattctcgttgaaattcaggcgctcatctcgccaacaagctttggcaacccaaggcgtatggcaacgggaatagaccataacagggtctctctgttaatggctgtgttagaaaaaagagttggactgctgctgcaaaatcaggatgcttatttgaaagtggctggcggcgttaagcttgatgaaccggcaattgatcttgccattgcgattagtatcgcatcaagctttagagacacacctccaaatcctgcagattgttttattggagaagtgggattaaccggagaagtccggcgggtttcaagaattgaacagcgtgtgaaagaagcggcaaagcttggttttaaacgcatgatcatacccgcggcaaatctggatggatggacaaaaccaaaagggattgaggttatcggagtagcaaatattgcagaagcgcttcgtacttcattaggaggataatagatggaaaaagagaaaaaaggggcgaaacacgagttagacctgtcatctatattgcagtttgttgctccgggtacaccgctcagagcggggatggaaaacgtcttgagagcaaatacaggcggtctgattgttgttggatataatgataaagtaaaagaagtggtggacggcggctttcacataaacacggctttttctccggcgcatttatatgagctggctaaaatggatggagcgatcattttaagtgattctggtcaaaagatcctctacgcgaatactcagctgatgccggatgccacaatttcttcatcagaaacaggaatgcggcacagaactgccgaaagagtagctaagcaaactggctgtcttgtaatcgctatttctgaaagaagaaatgtcataacgttatatcaggaaaacatgaagtatacactaaaagacataggatttattttaaccaaggcgaaccaagccattcaaacacttgaaaaatataagacaatcctcgataaaacgattaatgcactgaacgcgttagagtttgaggaacttgttaccttcagtgatgtcttgtctgtcatgcatcgttatgaaatggtactgagaatcaaaaacgaaattaatatgtatatcaaagagctggggacagaagggcatctgatcaaactgcaagtcattgaattgattacggatatggaagaagaggccgctttatttattaaggactatgtaaaagaaaagattaaagatccgtttgttctcttgaaggagctgcaggatatgtccagttatgatctgctggatgattccattgtgtataagcttctcggttaccctgcttctactaatcttgatgattatgtattgccgagaggatacaggctgttaaataagataccgcgtcttccgatgccgattgttgaaaatgttgtagaagcatttggagtcctgccaaggattattgaggcgagtgcagaagaattagatgaagtagagggaatcggtgaagtacgagcccaaaaaatcaaaaaaggattaaaacgcctgcaagagaagcattatttagacagacaactgtgatttcggttaaaaccttatgaatacgggtatattaatgttggtttttgtttattctgatattcgtaggatgcataagactttgtgaaattaaaatgttaaaaaaggaggtgggggtatgttaaaacgaatagttcaggcgttcttcattatttttggcggcgttgttggtatatttttgatacctgaattgtttgtactgttaaatatacaggacatacctttaataacaaacgcatatacgtctgcggcaataggagcaattatcttttttctcatcagtatatggggtacagaatacgttgtgaactgggtgaagtggatagaggattcattgttaaaagcgccggttccagatttgttatttggaagtcttggcttagtttttggacttataattgcttatcttatcgtaaatgttattcctttagacaatataccttaccgcatattcagcacaataattcctgtatttttggctttcttcctcggttatctcggcttccaggtgggctttaagaaaaaggatgaattgatcagcctgttttccatttccgccagaatgcaaaagaaaaaaggaacagctgatgaagaacatgaggttcaagacaagaagctgaaaattttggacactagtgttattattgatgggagaatagcagatatttgtcagactggttttttagagggagttatcgtgattccgcagtttgtccttgaggaattgcagcatattgcagactcttcagatgttttaaaacgaaacagaggacgccgcggtcttgatatcctgaaccgcattcagaaagaattagacattgaagttgaaatttacgaaggcgactttgaagatattcaggaggttgacagcaagctcgtcaaacttgctaagctgacatccggggtcgttgtgacgaatgattttaatttaaataaagtgtgcgagcttcagaaggtagcagtattaaacattaatgaccttgccaatgcggtcaagcctgttgtgcttcctggcgaggaaatgaatgttcaggtcattaaggacgggaaagagcataatcagggagttgcctacttggatgacggtacgatgattgtcgttgaagaaggacgaaattatatcggcaagcatattgatgtactcgtcacaagtgtgctgcagacagcagcgggacgaatgatttttgcgaagcctaagctgttggagaaggcgctgtaaagggagaagaaacaatgagttatgatgtggtgattcctgcagccggacagggaaagcggatgaaggcagggagaaataaactgttcattgatctgaagggagacccggtgatcatacacacgttaagagtgtttgacagccaccggcagtgcgataaaatcattttggtgattaacgagcaggagcgggagcactttcaacacttgctgtccgattacccgttccaaacttcaattgagcttgttgcaggcggagaagagcgtcagcacagtgtgtataaggggctgaaagccgtaaagcaggaaaagattgtccttgtacatgacggtgcccgcccatttataaaacatgaacaaattgacgaactgatcgcagaggcggaacagacaggagcggccatccttgctgttccggtaaaagatacgattaaacgcgttcaagatttacaagtcagtgagacgattgaacgttcaagcttgtgggctgtccaaacgccacaagcttttcgtctttctttattgatgaaggctcacgctgaggccgagcgcaagggatttttagggacggatgacgccagcctcgttgaacagatggagggcggttcggtccgtgttgtagaaggcagctatacaaatattaagctgacgacgccagacgatttgacgtcagctgaagctatcatggaatcagaaagtgggaataaacatgtttagaattggacaaggatttgatgtgcatcaattagtggagggccgtcctctcattattggcggaattgaaatcccgtacgaaaaagggctgcttggccattctgatgcagacgtattgctgcatactgtcgctgacgcctgcctgggagctgtgggtgaaggagacatcggcaagcattttcctgacacagatcccgagttcaaggacgcagattctttcaaattacttcagcatgtctggggaatcgtgaaacagaaggggtatgtccttgggaacattgattgcaccatcatagcgcaaaagccgaagatgctgccgtacatagaagatatgagaaaaagaattgctgaaggccttgaggcagaagtttctcaagtaaatgtaaaagcaacaacgacagaaaagcttggatttacaggccgggcggaaggaatagcggctcaggcgacagtactgatacaaaaaggctaacttgttttgatgccgggtctatttggtggtagaatagattcatacatttttgcctgaggccatacatgacatgaaaggaagtatttgaaaatgggaaacgaagtacgcgtccgttatgcaccgagtccaaccggacatttgcatattggaaatgccagaacggcgctttttaattatttatttgcccgcaatcaaggcggtaagtttatcattcgagttgaggatacagataaaaagcgcaatattgagggcggagaacaaagccagctgaattatctgaagtggctaggtattgactgggatgagagtgtggatgtcggaggagagtacggcccataccgtcagtcagagcgtaacgatatctataaagtgtactatgaagagcttcttgaaaaagggcttgcttataaatgttactgtacggaagaagagcttgaaaaagagcgtgaagaacagattgcccgcggagaaatgcctcgttattccggaaaacacagagacctgactcaggaagaacaggagaaatttatcgctgaaggcagaaaaccaagtattcgtttccgcgtgccggaaggaaaaatcatcgccttcaatgatatcgtaaaaggcgaaatttcttttgaatcagatggcatcggcgactttgttattgtgaaaaaggacggtacgccgacttacaacttcgcggtagcgattgatgactacttaatgaaaatgacacacgtgctgcgcggtgaggatcatatttctaacacaccgaaacagattatgatttatcaagcattcggatgggatattcctcagttcggacacatgacgctgatcgtaaacgaaagccgtaaaaagctcagtaaacgtgatgaatccattattcaattcatcgagcagtacaaagagcttggctacctgccagaagcactgttcaactttatcggcctgttaggctggtcaccggttggagaagaagagcttttcacaaaagagcagtttattgaaatttttgatgtaaatcgtttatctaaatcaccagctttgtttgatatgcataagctaaaatgggttaacaaccaatatgtgaagaagctggatcttgatcaggttgttgaattgacgcttccgcatttgcaaaaagccggcaaagttggcactgagctttctgctgaagaacaagaatgggttcgtaaactgatttccctgtatcatgagcaattaagctacggtgcggaaattgttgagctgactgatttgttctttacggatgagatcgagtataatcaagaagcgaaagctgttctggaagaagaacaggttcctgaagtgctcagtacattcgcagcgaagcttgaagagcttgaggagttcactccggataacatcaaagcatcgatcaaagcagtgcagaaagaaactggccataaagggaaaaaactgtttatgccgattcgtgttgctgtaacagggcaaactcatggtccggaactgccgcaatcaattgaattgatcggtaaagagactgcaattcagcgtttaaagaatatctaaataaatgattgttgacagggaagagtataaagctttaggccattacagaaaggatctccattggctgagagagatccatgagccgggttttagaagtgcgcccttaagacctttgaagaacgttttttgaaatcagtattcaaaggcggccgccgccgttacaggctgaagttgggagagcagaagtctgcttttcaaacagagtggaaccgcgcggttaaagcgtctctgtcatgtttacatgcagaggcgctttttttattgggtagaggaaatcagatagagaaacggggggaagcatgtgttttttagaatgctcaaagaagacattgatactgtgttcgatcaagatcccgcagcaagaagctattttgaagtgattttaacttattccggtttacatgctatatgggcgcatcggattgcacatgctttatataaacgaaaattttatttccttgcacgccttatatctcaagtaagccgattttttaccgggatagaaatccaccccggcgccacaatcgggagaagatttttcatagaccacggcatgggggttgtcattggggagacatgtgaaatcgggaataacgttaccgtttttcagggggttaccctcgggggaacggggaaagaaaagggaaaaaggcacccaacgattaaagatgacgcattgatagccacaggtgctaaagtgctcggttctattacggtcggtgaaggctcaaagattggggctggttcagtagtgctgcatgatgttcctgatttttcaacagttgtcggtatccctggacgggtcgttgtacaaaatggcaagaaagtaagacgcgatttaaaccatcaggatttgcccgatccggttgctgaccgctttaagtctttggaacagcagattttagagctgaaggcagaacttgaagacagaaaagaaaggatcaaccaaaaatgacaatcacactttataatacattgactagacagaaggaaacattcgttcctcttgaagagggaaaagtgaaaatgtatgtatgcggacccacggtttacaattacattcatatcgggaacgcgcgtccggcaatcgtttacgatacggttcgaaactatttagagtataaaggctatgatgtgcagtatgtctctaacttcacagacgtagacgataaactaattaaagcggcaaatgaactcggtgaggatgtacccaccatttcagagcgttttattaaagcatactttgaagacgtaggtgcgctcggctgccgaaaagccgaccttcatccgcgagtaatggagaacatggatgccattatcgaattcgtagatcagctcgtgaaaaagggctacgcatatgaatcagaaggtgacgtatatttcaaaaccagagcgtttgaagggtacggaaagctttctcagcaatcaatcgatgaacttagatcaggtgcacgcatccgagtcggcgagaaaaaagaagatgctcttgatttcgcactgtggaaagcggcaaaagaaggagaaatctcttgggatagcccttgggggaaaggacgtccgggctggcacattgaatgctcagcaatggtgaaaaagtatctcggtgaccagattgatatccatgcgggcggacaggatttaacattccctcaccatgaaaacgaaattgcgcaatctgaggcgctaacaggcaaaacgtttgcgaagtattggcttcataatggttatatcaatattgataatgaaaaaatgtcaaaatcactaggcaactttgtgcttgtgcatgacatcattaaacagcatgatccgcagcttttgagattctttatgctatctgttcattatcgccatccgattaactattcagaagagcttctggagaatacgaaaagcgcgttcaaccgtttaaaaacagcgtacagcaatcttcagcaccgtctgaacagcagtacgaatttaaccgaagatgacgatcaatggcttgaaaaagttgaagaacaccgcaaagcattcgaagaagcgatggacgatgattttaatacggcgaatgccatttcagtcttgtttgacttagcgaaacacgccaattattatcttcagaaagatcatacggctgatcatgtgattacggcgtttattgagatgtttgaccgcattgtttctgtcctcggtttttcgttgggtgagcaggaacttctcgatcaagagattgaagacttaatcgaaaagcgaaatgaagcgcgccggaatcgcgattttgcattgtcagaccagatccgcgaccagctgaaaagcatgaatatcattcttgaagatacggctcaaggcactcgctggaaacggggagaataacagatgcttgaatttgatacgataaaagattctaagcagcttaacggtcttgcgcttgcttatataggtgatgccatttttgaagtgtatgtcaggcatcacctgcttaagcagggctttaccaaaccaaatgatcttcataagaaatcaagccggattgtttcagcaaagtcacaggctgagatcctattttttctgcagaatcaatcattttttacggaagaagaggaagcggtgctgaaaagaggcagaaatgccaagtcagggacaacacctaaaaatacagatgttcagacgtaccgctacagtacagcatttgaagcgcttctgggctacctttttctagagaaaaaagaggaacgacttagtcagctcgtagccgaagctatacaattcgggacgtcagggaggaaaacaaatgagtcagcaacatgattacgtcatagggaaaaatgcagtgatcgagacgttaaaatctgatcggaagctgtataagctgtggatggcggaaaacaccgtaaagggacaagcacagcaagtgattgagcttgccaaaaagcagggaatcacgattcaatacgtcccgagaaaaaaactcgatcaaatggtgacaggacagcatcagggcgtagtggcacaggttgcagcgtatgaatatgcagaactggacgatttatataaagcagccgaagaaaaaaatgaacagcctttcttcctcattctggacgagcttgaagaccctcataatcttggttccattatgaggacagcagatgcggtcggcgctcatggcatcgtcattccaaaacggagagctgtcgggctgacaacaacagtggcaaaagcttcaacaggagcaattgagcacattcctgtagcaagagtcaccaatttggcacggacgttagaagagatgaaagagcggggaatctgggttgtcggaacggatgcgtccgcgcgtgaggattaccgtaatatggacggcaatatgcctttggctctagtcatcggaagtgaaggaaaagggatgggccgccttgtgaaagaaaagtgcgattttctcattaaactcccgatggccggaaaggtaacttcactaaatgcatctgtcgcggctggtcttttgatgtatgaagtctaccggaaacgaaaccctctgggagaataaagacccatggatatcctgttagtagacgggtacaacatgattggagcctggccgcagctgaaggatttaaaagcgaacagttttgaagaggcgagagacgtactgattcagaaaatggcggaatatcaatcgtatacaggaaacagggttattgttgtttttgacgcgcatctcgtaaaagggcttgagaaaaaacagaccaaccatagagttgaagtaatttttacaaaagaaaatgagacggctgatgagcggatagaaaagctcgctcaggctttgaataatattgcgactcaaattcacgttgcgacctctgactatactgagcagtgggcgattttcggacagggggcattgcggaaatcggcccgggagcttttgagagaggtagaaacgattgaaaggcgaatagagagacgggtaagaaaaatcacttccgaaaagccggcgggtaaaattgctttatcggaagaggttttgaaaacgtttgaaaagtggaggcggggagacttagattaagttgacgcttttttgcccaatactgtataatatttctatctacgtgcgccggggggatcggagtgaatctacagaacaacaagggaaaattcaacaaagagcagttttgccagttggaggacgagcaggtcattgaaaaggttcatgttggggacagtgatgcgttagattacttgattacgaagtaccgaaactttgttcgggcaaaagcaagatcctatttcttaataggggcggacagagaggatattgttcaggaaggcatgataggcctctataagtctattcgtgacttcaaagaggacaagcttacctcattcaaagctttcgcagaattatgtattacccgccaaattattaccgcaataaagacagctactcgccagaaacacattcctttgaattcctacgtctcattagataaaccgatttttgatgaagaatcagaccgaacgctgctggatgtcatttcaggagcgaaaaccttaaatcctgaggaaatgatcattaatcaggaagaatttgatgatattgaaatgaaaatgggagaactattaagtgatttagagagaaaagtactcgtcttatatctcgacgggagaagttaccaagagatttctgatgaactgaaccgacatgtgaaatcgatcgacaatgcccttcagcgtgtgaaacgcaagctggagaagtacttggaaattcgcgaaatcagtttgtaataggaatttatgctatattgacagtatttttctgactatgatatgttactaaagataagaactaatgtctatttagaaaaaggtgtaatgacatgagaaaaaagattacgttagcatgcaagacatgcggaaaccgtaattatacgacaatgaagagctctgcatcagcggctgagcgattagaagtaaagaaatactgcagtacttgcaattcacatacagctcatcttgaaacaaaatagtttttgcgcttttaaattgtggaggtcttttacatgcgtattatgaaattctttaaagatgttgggaaagaaatgaaaaaggtaagctggcctaaaggaaaagagttaacgcgttataccattacggtaatttcaacagttatcttttttgttatcttttttgccctccttgacacaggaatttctcaattaattcgtttaatagttgaataatgatcagcaatacgtgctataatagatcataatattacttgccaaaacccgttcagcgggttttttattgtggcttaaaatgaaagttatcataggcttgccgcctattttttgaagcgttatggtaattcactaaaaccaaatgcggggagggaaggactggacagtcctgaatagaatggaaaagaattggtatgttgttcacacgtactctggttatgagaataaagtaaaagccaacttggaaaagcgtgttgaatcaatggggatgcaggataaaattttccgtgtagtcgtacccgaagaagaagaaacggatatcaaaaacggcaagaaaaaagtcgtgaaaaagaaagtattccctggttatgtgcttgttgaaattgtaatgacagacgactcttggtatgtcgtccgcaacacgccgggcgttactggattcgtaggatctgccgggtcaggttcaaaaccgacgccgcttcttccgggggaagcagaaaccattctgaagagaatgggcatggatgaacgaaaaactgatattgactttgaactgaaagagacagtgaaagtgatagacggaccttttgctaactttacaggatcaattgaagagattgattatgataaaagcaaggtcaaagttttcgttaatatgtttggccgtgaaacgccggttgagctggaatttacccaaatcgataaattgtaatgtgaaaaaacttgaaattgctatatataaatgataatatagcaaaggtacgtcttggacttatccaaggcaactagcatgatatttcgtcattcatataaagaatgaaaccttgagtgggagggtttaccctattaccacatcacggacttaaggaggtgtgtctcgtggctaaaaaagtagttaaagttgtaaaattgcaaattcctgctggaaaagctaacccagcaccaccagttggacctgcacttggtcaagccggtgttaacatcatgggattctgtaaggagtttaacgctcgtacagctgaccaagctggtttaatcattcctgttgaaatttcggtttacgaagaccgttcatttacatttattacaaaaactccacctgctgcagtattgcttaaaaaagcagctggaattgagtctggttctggtgaaccaaaccgtaataaagtggcaaccgttaagcgcgataaagtacgcgaaatcgctgaaacgaaaatgcctgacttaaacgcagcagacgttgaagcggcaatgcgcatggttgaaggtactgcccgcagtatgggtattgtaatcgaggattaatttgtttcttgtcgggttgcgagttttaacaagttcgcaacccttattcgtgggaggttattccgctataaccacataaggaggaaattttaaaatggctaaaaaaggtaaaaagtacgttgaagctgctaagcttgtagaccgttctaaagcttacgacgtctctgaagcagtagctctcgttaaaaaaacaaacacagctaaattcgacgctacagttgaagtggctttccgtttaggggttgaccctcgtaaaaacgaccagcaaatccgtggagcagttgtgcttccaaacggaactggtaaaactcagcgcgttctcgttttcgcaaaaggcgaaaaagcgaaagaagctgaagctgctggtgcagatttcgtaggcgatactgactacatcaacaaaattcaacaaggctggttcgatttcgatgtaatcgtagctacacctgacatgatgggtgaagttggtaaaatcggtcgtgtacttggaccaaaaggtttaatgccaaaccctaaaactggtacagttactttcgaagttgaaaaagctatcggcgaaatcaaagctggtaaagttgaataccgcgttgataaagctggaaacattcatgttcctatcggtaaagtttctttcgaggatgaaaaacttgttgagaacttcacaacaatgtacgatacaatccttaaagctaaacctgctgcagctaaaggcgtttacgtgaaaaacgttgctgtaacttctactatgggacctggtgtcaaagtagactcttcaacttttaacgtaaaataatattgacatgacatcaacattctgatattattcaaaatgttgtaaaatagaatatcatttataccgtagacagtaggggcctaaccgcttaattatcctaccgaggtgtatattatcacagctattacgttacgtatgcttgtatatacagcctccatgtctcatggaggctttttatatggaatccgtcgtctcagtcgtgatcacctaacggtataagtgttacacaagaatctacaggaggtgtaaccatgagcagcgcaattgaaacaaaaaaagttgttgttgaagaaattgcttctaaactgaaagaaagtaaatcaacgatcatcgttgactatcgcggacttaacgtttctgaagtaactgaacttcgtaaacagcttcgcgaagctaacgttgagttcaaagtttacaaaaatacgatgactcgccgtgcggttgaacaagctgagcttaatggtttgaatgatttcttaactggaccgaacgcgatcgcattcagcactgaagatgttgtcgctccggctaaagttcttaatgacttcgctaaaaatcacgaagctcttgaaatcaaagctggcgttatcgaaggtaaagtttctactgttgaagaagtgaaagctcttgctgaacttccatcacgcgaaggcttgctttctatgttgcttagcgtacttcaagctccagttcgcaaccttgctcttgctgcaaaagctgtggcagaacaaaaggaagaacaaggcgcttaatctaatcagtttttcataaattaaaacaaaatggaggaattacaaatggctttaaatatcgaagaaatcattgcttccgttaaagaagcaactgtacttgaattgaacgacctagtaaaagcaatcgaagaagaatttggcgtaactgctgctgctcctgtagctgtagctggcggagctgctgctggcggagctgctgaagagcaaagcgaattcgatcttatccttgctggtgcaggatctcaaaaaatcaaagttatcaaagttgtacgtgaaatcactggtcttggcttgaaagaagctaaagaacttgttgacaacactccaaaaccacttaaagaaggtattgctaaagaagaagctgaagagcttaaagctaaacttgaagaagttggcgcttctgtagaagttaagtaatcttcacttacctgtaggggaagctcgcttttatgaggcgagctttttctttgccattctttaagccatgaaaaaaggaggttctaataatgagtgagcactattattcagaaaaaccttcagtaaaaagcaacaagcaaacctggtcttttaggcttcggaataaagatttcacgtttaccagcgacagcggggttttttctaaaaaagaagttgatttcggctcccgcctgctgattgattcttttgaagagcctgaggttgagggcagctttttggatgtaggctgcgggtacggcccgattggtttatcgctggccagcgactttaaagaccggactatccacatgattgacgttaatgagagagccgtagaactatcaaatgaaaatgcggaacataacggaataacaaacgttaagatttatcaaagtgatttgttttcaaacgttgattctgctcaaacatttgcttctattcttacaaatcccccaatccgagccggaaaaaaagttgtccatgctatctttgagaaaagcgctgaacacttaaaagcttcaggtgaattgtggatcgtcatacagaaaaagcaaggcgcgccttctgccattgaaaagctcgaggaactgttcgatgaagtttccgtcgttcaaaaaaagaaaggctattatatcataaaagcaaaaaaagtttgactcggtattttaactatgttaatattgtaaaatgccaatgtatatattttgcttgatatgatgaattgtcaatatctatgtataaattatacaagtatggaaatgctaataaaatcggtatttgtttttggatgtggttttcttaattagaaacccttttttcttttgtcttgtaaaagtattttctttctttggaagaaatgcttattacacatataatacgcatgatttgaggggtgaatcagttgacaggtcaactagttcagtatggacgacaccgccagcgcagaagctatgctcgcattagcgaagtgttagaattaccaaatctcattgaaattcaaacctcttcttatcagtggtttcttgatgagggtcttagagagatgtttcaagacatatcaccaattgaggatttcactggtaacctctctcttgagttcattgattatagtttaggtgagcctaaatatcctgtagaggaatcaaaagaacgtgatgtgacttactcagctccgctaagagtgaaggttcgtttaattaacaaagaaactggagaggtaaaagaccaagatgtcttcatgggtgatttccctattatgacagatacaggtacttttatcattaacggtgcggaacgtgttatcgtttcccagcttgttcggtctccaagtgtatatttcagtggtaaagtagacaaaaacggtaaaaaaggttttaccgcaactgtcattccaaaccgtggcgcatggttagaatacgaaactgatgcgaaagatgttgtttatgtccgcattgatcgcacacgtaagttgccggttacggttcttttgcgtgctctcggcttcggctccgatcaagagattcttgatctcataggagaaaacgaatacctgcgaaatacgcttgataaagataacacagaaaacagcgacaaagcgttgctggaaatttacgagcgtctccgtcctggagagccgcctacagtagaaaatgcgaaaagcttgcttgattctcgtttctttgatccgaaacgatacgatcttgccaatgtaggacgctataaaattaataaaaaacttcatattaagaatcgcctcttcaatcagagacttgctgaaacgcttgttgatcctgaaacaggagaaatccttgctgaaaaaggccagattcttgatagaagaacgcttgataaagtactgccatacttagaaaacggaatcggttttagaaagctgtatccgaatggcggcgttgttgaagatgaagtgactcttcaatcaattaaaatctttgctccgactgatcaagaaggagaacaggttatcaatgtaatcggcaatgcttacatcgaagaagagattaaaaacatcacgcctgctgatattatttcttcaatcagctacttcttcaacctgctgcacggagtaggcgacacagatgatatcgatcatcttggaaaccgccgtttacgttctgtaggcgagcttctccagaaccaattccgtatcggtttaagccgtatggagcgtgtggttcgtgagagaatgtcaattcaagatacgaatacaattacgcctcagcagctgatcaatattcgtcctgttattgcgtccattaaagagttctttggaagctcacagctttctcaattcatggatcagacgaacccgcttgctgaattaacgcacaagcgtcgtctgtcagcattaggaccgggcggattgacacgtgagcgtgccggaatggaagtgcgtgacgttcactactcccactatggccgtatgtgtccgattgaaacgcctgagggcccgaacatcggtttgatcaactcactatcatcttatgcaaaagtaaaccgttttggctttattgaaacgccatatcgccgcgttgaccctgaaacagggaaggtaacgggcagaatcgattacttaactgctgatgaagaggataactatgttgtcgctcaagcgaatgctcgtcttgatgacgaaggcgcctttattgatgacagcatcgtagctcgtttccgcggggagaacaccgttgtttccagaaatcgtgtagactacatggatgtatcgcctaagcaggttgtatctgctgcgacagcatgtatcccgttcttagaaaacgatgactccaaccgtgccctcatgggagcgaacatgcagcgtcaggctgtgcctttgatgcagccggaagcgccatttgttggaactggtatggaatacgtatcaggaaaagactctggtgccgctgttatttgtaaacaccctggtatcgttgaacgcgtagaagccaaaaacgtttgggttcgccgttatgaagaagtagacggtcaaaaagtaaaaggaaacctggataaatacagcctgctgaaatttgtccgctctaaccaaggtacgtgctacaaccagcgtccgatcgtaagtgtcggcgatgaagtggtaaaaggagaaatccttgctgacggtccttctatggagcttggtgaacttgcacttggccgtaacgtaatggtcggcttcatgacgtgggatggctacaactatgaggatgccatcatcatgagtgaacgcctagtgaaggatgatgtttatacatctatccacattgaagaatacgaatcagaagcacgtgatacgaaacttggacctgaagaaatcactcgcgatattccaaacgtcggtgaagatgcgcttcgcaatcttgatgaccgcggaatcatccgtattggggcagaagtaaaagacggagatcttcttgttggtaaagtaacgcctaaaggcgtaactgaactgactgccgaagaacgccttcttcacgccatctttggcgagaaagcccgcgaggttcgtgatacttctcttcgtgtgcctcatggcggcggcggaattatccatgacgttaaagtcttcaaccgtgaagacggagacgaacttcctccaggtgttaaccagttagtacgcgtatatatcgttcagaaacgtaagatttctgaaggggataaaatggccggtcgtcacggtaacaaaggtgttatctctaagattcttcctgaagaggatatgccttaccttcctgacggcacaccaattgatatcatgcttaacccgctgggcgtaccatcacgtatgaacatcgggcaggtattggaacttcacatgggtatggccgctcgttaccttggcattcacattgcatctcctgtatttgacggagcgcgagaagaggatgtctgggaaacacttgaagaagccggcatgtctcgtgacgccaaaacagtgctttacgacggacgtactggagagccgtttgataaccgtgtatctgtcggtatcatgtacatgatcaaactggctcacatggttgacgataaacttcatgcacgctctacaggtccttactcacttgttacgcagcagcctcttggcggtaaagcgcaatttggcggacagcgttttggtgagatggaggtttgggcacttgaagcttacggtgcggcttatactcttcaagaaattctgactgttaagtctgatgacgtggttggacgtgtgaaaacatacgaagccatcgttaaaggcgacaatgttcctgaaccaggtgttccggaatcattcaaagtattaatcaaagaacttcaaagcttaggtatggatgtcaaaatcctttctggtgatgaagaagaaatagaaatgagagatttagaagacgaagaagatgcgaaacaagctgacggcctggcattatcaggtgatgaagagccggaagaaacagcatctgcagacgttgaacgcgatgtagtaacaaaagaataatctctagttataaaggcaagtgacatcggttaatccgaagataaaaagggaggtaggccccttgctagatgtgaacaattttgagtatatgaacatcggtcttgcttcaccagataaaatccgttcatggtcttttggtgaagtgaaaaagcctgaaacgataaactatcgtacgttaaaacctgaaaaggacggtctattctgcgaacgcattttcggaccgactaaggactgggaatgtcattgcgggaagtacaagcgagttcgttataaaggcgtagtttgtgaccgctgcggagtcgaagtaacacgggctaaagtccgtcgtgagagaatggggcacattgaactggctgccccagtttcccacatttggtatttcaaaggtattccaagccgtatgggtcttgtgctggatatgtcacctcgtgctttagaagaagtcatttactttgcttcttacgttgtaactgatccggcgaatacaccgcttgaaaagaaacagcttctgtctgagaaagaatatcgtgcttatcttgataaatacggtaataaattccaagcatctatgggtgctgaagcaattcataaacttcttcaagatattgatcttgtaaaagaagttgatatgttaaaagaagagctgaaaacttcacaaggacaacgccgtactcgtgcgatcaaacgtcttgaagttttagaagccttccgtaactcaggaaacaagccttcttggatgatccttgatgtgcttcctgttattcctccggagcttagaccgatggttcagctagatggcggtcgttttgcgacttctgatttgaatgacctttatcgtcgtgtcatcaaccgtaacaatcgtttgaaacgccttttggaccttggtgcgcctagcatcatcgttcaaaacgaaaagcgtatgcttcaagaggctgtcgatgccctaattgacaacggccgccgcggacgccctgtaacaggtcctggtaacagaccgttaaaatctctttctcacatgctgaaagggaagcaaggccgtttccgtcaaaaccttcttggtaaacgtgttgattactccggacgttctgtaatcgttgttggtcctcatttgaaaatgtaccaatgcggattaccgaaggaaatggcgcttgaacttttcaaacctttcgttatgaaagaacttgttgaaaaaggtcttgctcacaacattaagagtgcgaaacgcaaaattgagcgcgtacagcctgaagtttgggatgtactagaatcagttattaaggagcatccggtactgctgaaccgtgcccctacacttcacagattaggtatccaggcgtttgaaccaacgcttgttgaaggacgcgcaatccgtcttcacccgctcgtatgtacagcttacaacgctgactttgacggtgaccaaatggcggttcacgtaccattatctgctgaagcacaagctgaagcacgcatcttgatgcttgctgctcaaaacatcttgaaccctaaagatggtaaaccggttgtaacaccgtctcaggatatggtactaggtaactattacctgacacttgagcgtgccggtgctgtcggtgaaggtatggtcttcaagaatacagacgaagcgcttcttgcttatcaaaacggatatgttcaccttcatacgagagtagctgttgcagctaactcacttaagaatgtgacatttaccgaagaacagcgctcaaaattgttaattacaactgtcggtaagcttgtcttcaatgaaattcttccggaatcattcccttacatgaatgaaccaacgaagagcaacattgaagagaaaacaccagaccgtttcttcttagaaaaaggtgctgatgttaaagctgttatcgcacagcagccaatcaatgcgccgtttaaaaaaggcattctgggtaaaatcatcgcggaaatctttaaacgattccatattacggaaacgtctaaaatgcttgaccgcatgaaaaacctaggtttcaaatattcaactaaagctggtattacagttggggtttctgacatcgtcgtactcgatgataaacaagaaattcttgaggaagcgcaaagcaaagttgacaacgttatgaagcaattccgccgcggtcttatcactgaagaagaacgctatgagagagtcatctctatctggagtgctgcaaaagacgttatccaaggcaaactgatgaaatcacttgatgaactcaacccgatctacatgatgagtgactctggtgcccgtggtaacgcatctaactttacgcagcttgccggaatgcgcggcctgatggccaacccggctggacgtatcattgagttgccgatcaaatcaagtttccgtgaaggtctgacagtattggagtactttatctccacacacggtgcgcgtaaaggtcttgccgataccgctcttaaaactgctgactcaggttaccttacacgccgtctcgttgacgttgctcaggatgttatcatccgtgaaactgattgcggaactgaccgaggcattcttgctaagcctcttaaagaaggaactgaaacaattgagcgcttagaagaacgcttaatcggacgttttgcaagaaaacaagtgaagcaccctgaaacaggtgaagtgcttgtgaatgaaaacgaactgatcgatgaagataaagcactggagattgtcgaagccggcattgaagaagtgtggatccgttctgccttcacatgtaatacgcctcatggtgtatgtaaacgatgctatggccgaaatcttgcaactggctccgatgttgaagtcggtgaagctgtcggaatcattgctgcccaatcaatcggtgagcctggtacacagttaacaatgcgtacattccatacaggcggggttgccggagatgacatcacacagggtcttccgcgtatccaagagcttttcgaagcgcgtaatccgaaaggtcaggcaacaattacagaaatcgacggtacagtcgttgagatcaatgaagttcgtgataagcaacaggaaattgtggttcaaggcgcagtggaaacacgttcttatacggcaccttacaactcccgcctgaaagtagcggaaggagataaaattactcgaggccaagtactgacagaaggttcaatcgatccgaaagaacttcttaaagtgactgacctgacgactgttcaagagtatcttctccatgaggttcaaaaggtttaccgtatgcagggtgttgaaatcggtgataaacacgtagaagtaatggttcgccagatgcttcgtaaagtacgcgtgattgatgccggtgacactgatgtgcttccaggtacattgcttgatattcaccaatttactgaagcgaacaaaaaggtattgcttgaaggcaatcgacctgctacaggccgtcctgtcttactcggtattacaaaagcatctcttgaaactgattcattcttatctgctgcttccttccaggaaacaacacgtgtccttacagatgcagcgatcaaaggtaagcgtgacgagcttctcggcttgaaagagaatgttatcatcggtaagcttgttccagctggtacaggaatgatgaaataccgtaaagtaaaaccagtatcaaatgttcagccgactgacgatatggtcccggttgaataactgatttaactctgctgaaagactgcaaaaacagtctttcagcagatatatttatgaaaaagtcactctatgagaagaacgaatctaaaaaatgtcataccttgttgacattcgtctcctagaatgataatataaccaaggtgctcgaaataaacctgttactttggaggatatgtttatgtcttatgataaagtatcacaggccaaatcaattattattggtacgaagcaaacagtgaaagctctaaagcgaggttcagtaaaggaagtagtcgttgcaaaagacgcagatccgatactcacgtcaagtgttgtttcacttgctgaagatcaaggtatctctgtctcaatggttgaatccatgaaaaagctcggcaaagcctgcggaattgaggtaggagcagccgctgttgccattattttataacgtacttttgtttttgcgtaagattccatcttgtgtaaagacattgttttttgccttttgatgaaccacctgggtatgtgggttataaaacgtaatgaagggaggaaaaattcatgcctacaattaatcagctaattcgcaaaggacgcgtgagtaaagtagaaaactcaaagtctcctgcacttaacaaaggatacaacagctttaaaaaagagcacactaacgtatcttctccacaaaaacgcggggtatgtactcgtgttggtacaatgacaccgaaaaaaccgaactcagcacttcgtaaatatgctcgtgttcgtttgactaacggaatcgaggttactgcttacattcctggtatcggtcacaacctacaagagcacagtgttgtacttatccgcggcggacgtgtaaaagacttaccaggggtacgttaccacatcgttcgtggtgcgcttgatactgctggagttgaaaaccgtgcacaaggccgttctaaatacggtacgaaaaaacctaaagcaaaataatatacgaaaatacgcataattgatgaagggaggatattcagatgccacgtaaaggtcctgtagcaaaaagagatgttttacctgatccgatttacaactctaagcttgtatctcgtttaatcaacaaaatgatgatcgatggtaaaaaaggtaagtctcaaacaatcctatacaagtcattcgatatcattaaagaacgtactggcaatgatgcaatggaggttttcgaacaagcattgaaaaacatcatgcctgtacttgaagtaaaagcacgccgtgtaggtggtgcgaactaccaagttcctgtagaagttcgtcctgaacgtcgtacgactcttggacttcgctggttagttaactacgctcgtcttcgcggagaaaaaacgatggaagagcgtttagctaacgaaatccttgacgcagctaacaacactggtgctgctgttaagaaacgtgaagacactcataagatggctgaagcaaacaaagcatttgctcactatcgctggtaggatttatagattaacaaaacacaatttcctaataaggaaggagaaattacccaatggcaagagagttctccttagaaaaaactcgtaatatcggtatcatggctcacatcgatgccggtaaaacgactactacagaacgtatcttgttctatactggtcgtatccacaaaattggtgaaactcatgaaggagcttcacaaatggactggatggagcaggaacaagaacgtggtatcacaatcacttccgctgcgacaactgcacagtggaaaggataccgcgtaaacatcatcgatactccaggacacgtagacttcacagttgaagttgaacgttctcttcgtgtacttgatggtgctgttgctgtacttgacgcgcaatcaggcgttgagcctcaaacagaaactgtttggcgtcaggcaacaacttatggagtaccgcgtatcgtttttgttaacaaaatggacaaaatcggtgcagacttcctttactctgtaggaactttaagagaccgtcttcaagcaaacgctcatgcaattcaattgccgatcggtgctgaagataacttcgaaggtatcattgaccttgtagaaaacgttgcgtatttctacgaagatgacctcggaactcgttctgatgcaaaagaaatccctgaagagtacaaagagcaagccgaagagcttcgcaacagccttattgaagctgtatgtgagcttgatgaagagcttatggataagtaccttgagggtgaagaaatcacaattgacgagttaaaagcaggaattcgtaaaggtacattaaatgttgaattctaccctgttcttgttggttctgccttcaaaaacaaaggtgttcaactagtacttgatgctgttcttgactaccttcctgcaccaactgacgttgctgcaatcaaaggtacacgtcctgatacaaatgaagagattgagcgtcattcttctgacgaagagccattctctgcattagcatttaaagttatgactgacccttacgttggtaagttgacgttcttccgtgtgtactctggaacacttgattctggttcatacgtgaaaaactctactaaaggcaaacgtgagcgtgttggacgtattcttcaaatgcacgctaacagccgtgaagaaatctctactgtatacgcaggggatatcgcagctgctgtaggtctaaaagatacaactactggagatactctatgtgatgagaaggatcttgttatccttgagtcaatggaattcccagaaccagttatcgacgttgctattgagcctaaatcaaaagctgaccaagataaaatgggtatcgctttagcgaaacttgctgaagaagatcctacattccgtactcaaacaaacccagaaactggccaaacgatcatctctggtatgggtgaacttcaccttgatatcattgttgaccgtatgaaacgcgaatttaaagtagaagccaatgttggtgctcctcaagttgcgtaccgtgaaacattccgtaccggtgctaaagttgaaggtaaattcgtacgtcagtctggtggacgcggtcagttcggacacgtttggatcgaattcgaaccaaacgaagaaggcgctggctttgaatttgaaaatgcgattgtcggtggggttgttcctcgtgaatacatcccagctgttcaagcaggtctggaagatgcacttgaaaatggtgtactagcaggcttcccgcttatcgacattaaagctaaacttttcgacggttcttaccatgatgttgactcaaacgaaatggcatttaaagttgctgcttctatggcattgaaaaatgcagtcagcaaatgtaacccagttcttcttgaaccaatcatgaaagtagaagtggttattccagaagaatacatgggagatatcatgggtgatattacttcacgtcgcggacgcgtagaaggtatggaagcacgcggtaacgctcaagttgttcgcgctatggttcctcttgctgaaatgttcggttacgctactgcacttcgttctaatacgcaaggtcgcggtacgttcactatgcacatggatcactacgaagaagtgccgaagagcgtcgcagaagaaattatcaaaaaaaataaaggcgaataattgattttgccgcttaactcaagtataactactattgtaagatgaggaagtgaaagctttctttcacttcctatcactctatacattactaattaaaagctcttaaggaggattttagaatggctaaagaaaaattcgaccgttccaaatcacatgccaatattggtacaattggacacgttgaccatggtaaaacaactttaactgctgctatcacaacagtacttcataagaaatctggtaaaggtacagctatggcgtacgatcaaattgatggtgctccagaagaacgcgagcgcggtatcacaatctctactgcacacgttgagtacgaaactgaaactcgtcactatgcacacgttgactgcccaggacacgctgactatgttaaaaacatgatcactggtgctgcgcaaatggacggagctatccttgtagtatctgctgctgatggcccaatgccacaaactcgtgagcacatccttctttctaaaaacgttggtgtaccatacatcgttgtattcttaaacaaatgcgacatggtagacgacgaagagcttcttgaactagttgaaatggaagttcgcgatcttcttagcgaatacgacttccctggtgatgatgtaccagttgttaaaggttctgctcttaaagctcttgaaggagacgctgagtgggaagctaaaatcttcgaacttatggatgcggttgatgagtacatcccaactccagaacgcgacactgaaaaaccattcatgatgccagttgaggacgtattctcaatcactggtcgtggtacagttgctactggccgtgtagaacgcggacaagttaaagtcggtgacgaagttgaaatcatcggtcttcaagaagagaacaagaaaacaactgttacaggtgttgaaatgttccgtaagcttcttgattacgctgaagctggtgacaacattggtgcccttcttcgcggtgtatctcgtgaagaaatccaacgtggtcaagtacttgctaaaccaggtacaatcactccacacagcaaattcaaagctgaagtttacgttctttctaaagaagagggtggacgtcatactccattcttctctaactaccgtcctcagttctacttccgtacaactgacgtaactggtatcatccatcttccagaaggcgtagaaatggttatgcctggagataacactgaaatgaacgttgaacttatttctacaatcgctatcgaagaaggaactcgtttctctattcgtgaaggcggacgtactgttggttcaggcgttgtttctacaatcactgagtaatagtatgattttaaacgagacccctgcgggtctcgttttttgtttgcttatctttttcttgtataataggatctatcatattcgaggggttaatatttatgattcctgaaaagaaatcaatcgcaatcatgaaagaactaagcattggaaatacaaagcaaatgctgatgattaatggagttgacgtggaaaatccattgttgctttttttacatggcgggccgggaacgccgcaaatcggatatgttagacattatcaaaaagagctggaactgtattttacagtagttcattgggatcagagaggatcggggctttcttattctaagcgaatttcgcatcactctatgacaataaatcacttcattaaagatacaatccaagtcactcaatggcttttagctcatttttcaaaatcaaaactttacctagccggtcattcttgggggtcaatactggcgcttcatgttttgcagcagtgtcctgatttattttacgcgtattatggaatcagccaggttgttaaccctcatgatgaagaatcaactgcttatcaacatattcgtgaaatttctgaatcaaaaaatgccagcttattatctttcctcacacgtttcattggtgctccgccttggaagcaggatatccagcaccttatctatcggttttgtgtcgagctaagcaggggaggcttcactcgccgtcatcgtcaatctctagctgtattatttcaaatgcttactggcaatgagtatggagtgcggaacatgcacagcttcctcaatggattgcgcttcagtaaaaaacatttaactggtgagttgtaccggtttaatgcttttacatcagttccttctattaaagtaccgtgtgttttcatttcagggaaacatgacttaattgttcctgctgaaatatcgaaacagtattatcaagagcttgaggcacccgaaaagcgctggtttcaatttgagaactcagctcacaccccgcatattgaggagccggcattattcgcgaacacattaagtcgacatgcacgacaccatttatgatagatccttgataaataagaaaaacccctgtataataaaaaaagtgtgcaaaccatgcatattttaaataagtcttgcaacatgcgcctattttctgtataatggtgtatgttggtctttgactgcgatgaagtgagaggttgctgacacacccggccgctttgccatggcaaggtgttcaggtttttctcacggagaactgtctaacgtgatgtaggcgaaaaggagggaaaataatggcaaaacaaaaaattcgtattcgtttgaaagcatatgatcatagaatccttgatcaatctgcagagaagattgttgaaacggcaaaacgttctggtgccagcgtatctggtccgattccgttgccaactgaaaaatcagtttacacaatccttcgtgcggtgcacaaatacaaagattctcgtgagcaatttgaaatgcgtacacataaacgtttaatcgacattgtgaacccaacaccacaaactgttgatgctcttatgcgattagacttaccatctggtgtcgatatcgaaattaaactttaattctaaaatatagaatgatcttaataggaggtgtgacgaatgaccaaaggaatcttaggaagaaaaattggtatgacgcaagtattcgctgagaatggtgatcttattccggtaactgttatcgaggctgctccaaacgttgttcttcaaaagaaaacagctgaaaacgacggttacgaagcaatccagcttggttttgacgacaagcgtgaaaagctttctaacaaacctgaaaaagggcacgttgcaaaagcggaaactgctcctaagcgcttcgttaaagaattacgcggagtggaaatggatgcgtatgaagttggtcaggaagtcaaggttgaaattttctctgctggagaaatcgtagatgtaacaggagtatctaaaggtaaaggtttccaaggtgcgatcaagcgccacggacaatctcgcggacctatgtctcacggttcacgctaccaccgtcgtcctggttcaatgggacctgtagatcctaaccgtgtattcaaaggtaaattattacctggacgtatgggcggagagcaaatcactgttcaaaaccttgaaatcgtaaaagttgatgcagaacgcaatcttcttttgatcaaaggtaacgtacctggtgcgaagaaatctttaatcactgttaaaagtgctgttaaatctaaataattctcttaggaaaggaggaaattgattatgccaaaagtagcattatacaaccaaaacggttctactgctggtgacatcgaattaaacgcttctgtatttggtatcgaaccaaatgagagtgttgtattcgacgctattcttatgcaaagagcttccttacgtcaaggaactcacaaagtaaaaaatcgttctgaagtacgcggcggaggtcgtaaaccatggcgtcaaaaaggtactggacgtgcccgtcaaggttcaatccgttcaccgcaatggcgcggaggtggtgtcgtattcggcccaacaccacgcagctattcttataaattacctaaaaaagttcgccgcttggcaatcaaatcagtattgtcttctaaagtgatcgacaacaacatcatcgttcttgaagatcttactcttgatacggctaaaacaaaagaaatggcagctatccttaaaggattatctgttgagaaaaaagctttaatcgtaactgcggatgcaaacgaagcagtagctttatctgctcgtaacattcctggagttactgttgttgaagctaacggaatcaacgttttagacgttgtcaaccacgagaagcttctgattacaaaagcagcggttgaaaaagtagaggaggtgcttgcataatgaaagatcctcgtgatgttctaaagcgccccgtcattactgaacgttctgctgatttaatgactgaaaagaaatatacttttgaagttgatgtaagagctaacaaaacagaagtgaaagacgcggttgaaagcatctttggagtgaaagttgacaaagtcaacatcatgaactacaaaggtaaatcaaaacgtgttggacgctacactggtatgactagccgtcgcagaaaagcgatcgtaaaacttactgcagacagcaaagaaatcgaaatttttgaagcttaattatctgtaaaaagaaggagggaaattcaaaatggcgattaaaaagtataaaccgacctctaatggacgtcgtggcatgacaacttcagattttgctgaaatcacgactgacaagccggaaaaatccttgcttgctccccttcacaaaaaaggcggacgtaacaaccaaggtaaattgactgtacgtcaccaaggtggcggacataaacgccaataccgtgttatcgacttcaaacgcgataaagatggtatacctggacgcgttgctacagttgaatacgatccaaaccgttcagctaacatcgctctaatcaactatgcagacggagaaaaacgttacattcttgctcctaaaggaattcaagtaggtactgaaatcatgtcaggtcctgaagctgacattaaagtaggtaatgcacttccacttatcaacatccctgttggtacagttgtgcataacattgaattaaaacctggtaaaggcggacagcttgtacgttcagctggtacatctgctcaggttcttggtaaagaaggtaaatacgttcttgtacgtcttaactctggtgaagttcgcatgatcctttctgcttgccgtgcttctatcggtcaagtaggtaacgaacagcacgaacttatcaacattggtaaagctggacgttctcgctggaaaggcatccgtcctacagttcgtggttctgtaatgaaccctaacgatcacccacacggtggtggtgaaggacgtgcgccaatcggacgtaaatcaccaatgtctccatggggcaaacctactcttggattcaagactcgtaagaaaaagaacaaatccgataaatttatcgtacgtcgtcgtaaaaataaataacggggttgtctacggttcttttcggaccgtagtgcaatcacgaagggaggttccaaaatggctcgcagcttaaaaaaaggaccatttgtcgatggacacttgatgactaaaatcgagaaattaaatgaaacagacaagaaacaagtcgtaaaaacttggtctcgtcgttctactattttcccacagtttattggtcacacaatcgcagtctatgacggacgtaaacacgtgcctgtattcatctctgaagatatggtagggcacaagttgggtgaattcgctccaactcgtacgtacaaaggtcatgctagtgatgacaaaaaaacaagacgctaagagaggaggcttttaaatgcaagctaaagctgttgcaagaacagtccgtattgctcctcgtaaagcacgtctagtaatggacctgattcgaggcaagcaagtaggtgaggcagtatcaatcttgaaccttacaccaagagctgcttctccaattatcgagaaagtattaaaatccgctattgcaaatgctgagcataactatgaaatggacgctaacaacctggttatttctcaagcattcgttgacgaaggccctacgttaaaaagattccgcccacgtgctatgggacgtgcgagccaaatcaacaaacgtacgagccacattacaatcgttgtatcagaaaagaaggagggataagtagtgggtcaaaaggtaaatccagtcggtcttcgtatcggagtcattcgtgattgggaatctaagtggtacgctggtaaagattacgctgacttcctgcacgaagatttaaaaattcgtgaatacattagcaaacgcctttctgacgcttctgtttctaaagtagaaatcgagcgtgcagcaaaccgcgttaacattacgatccacacagctaagcctggtatggttatcggtaaaggcggttctgaagtcgaagcacttcgcaaagcccttaacagccttactggcaagcgtgtacacattaacattcttgaaatcaaaagagcagatcttgatgcacagctagttgctgacaacatcgctcgtcaattagaaaaccgtgtttctttccgccgtgcgcagaaacaacaaatccaacgtactatgcgtgctggagcacaaggtgtgaaaacaatggtttctggtcgtcttggcggtgcagatatcgctcgttctgaatactacagtgaaggaactgttccattgcacacattacgtgcggacattgactatgcaacatctgaagctgatactacttacggtaagcttggtgtaaaagtctggatctatcgtggagaggttcttcctactaagaagaaaactgaggaaggaggaaaataatatgttattaccaaaacgcgttaaatatcgcagagagcatcgcggaaaaatgcgtggccgtgcgaaaggcggtactgaagtacatttcggagaattcggtatccaagctcttgaagcttcttggattactaaccgtcaaatcgaagctgcacgtattgcgatgactcgttacatgaaacgtggcggtaaagtttggatcaaaattttcccttctaaaccttacactgctaaaccacttgaggtacgtatgggatccggtaaaggggctccagaaggttgggtagctgttgtaaaaccgggcaaagttttatttgaaatttctggtgtgtctgaagaggttgctcgtgaagcgcttcgccttgcatctcacaaattgccaattaaaacgaagttcgtaaaacgtgaagaaattggtggtgaatcaaatgaaagctaatgaaattcgtgaccttaccactgctgaaattgaacaaaaagtaaagtctcttaaagaagaacttttcaatcttcgctttcaattagcgacaggacaacttgaaaatactgctcgcattcgtgaagtgcgcaaagctatcgcgcgcatgaaaactgtgattcgtgaaagagaaattgctgctaataaataatcactgaggggaggtcgtgagcatgagcgaacgtaaccaacgcaaagtttaccaaggccgtgttgtttctgacaaaatggataaaaccattactgttgttgttgagacatacaaaaaacatacactttacggtaaacgcgtaaaatactcaaaaaaattcaaagcacatgatgaaaataatcaagctaaaatcggtgacatcgttaagatcatggaaactcgtccattgtctgcaactaagcgtttccgtctagttgaagttgtcgaagaagctgttattatctaataaagttcggaattctttttccgaagggaggtaacaaataatgattcaacaagagactcgtttaaaagtagctgacaactctggcgcacgtgaagtacttactattaaagttcttggtggttctggacgtaaaacagctaacattggtgatgtaattgtttgcacggttaaacaagcaacaccaggaggcgttgtcaaaaaaggtgaagtcgtaaaagctgttatcgttcgcactaaaagcggagcgcgcagaagtgacggttcatacatcagcttcgatgagaatgcatgtgttatcatccgtgacgacaagagcccacgcggaactcgtatcttcggaccagttgctcgtgaattgcgtgaaaacaactttatgaaaattgtttctctagctccagaagttatctaatgaaataaatgccttactcaaggaggtgcgatcaggatgcatgtaaaaaaaggcgataaagttatggttatctctggtaaagataaaggcaaacaaggaacaatccttgctgctttccctaaaaaggaccgcgttttagttgaaggtgttaacatggtaaagaaacactctaaaccaactcaagctaaccctcaaggcggtatttctaatcaagaggcgccaattcatgtatcaaacgttatgccgctcgatcctaaaacaggtgaagtgactcgcgtaggatacaaagtggaagatggcaaaaaagttcgtgtagcaaaaaaatctgggcaagttctagataaatagtattaaaaggaagggaggtctatctcatgaaccgccttaaagaaaagtacaataaagaaattgcacctgctttaatgactaagttcaattatgattcagtcatgcaagtgcctaaaatcgaaaaaatcgtaatcaacatgggtgttggtgacgctgttcaaaacgccaaagcaatcgacagtgctgttgaagaattaacgtttatcgcaggtcaaaaacctgtcgttactcgtgcgaagaaatcaattgctggattccgtcttcgtgagggaatgcctatcggtgcgaaagtaactcttcgcggagagcgcatgtatgatttccttgataaacttatttctgtatctttaccgcgtgtacgtgacttccgcggggtttctaaaaaatctttcgacggtcgcggtaactacacacttggtatcaaagaacagttaatcttccctgaaattgactacgataaagtaacaaaggttcgcggaatggacatcgttatcgtaacaactgctaatactgacgaagaagctcgtgagctattaactcaagtaggtatgccgttccagaaataatcaatgaaagggaggcgaaatcgtggctaaaaagtctatgattgcgaaacaacaacgtacaccaaagtttaaagtacaagagtacacacgctgtgaacgctgcggacgtccgcattcagtcattcgtaaatttaaactttgccgtatttgtttccgtgagcttgcatataaaggacaaattcctggcgtgaaaaaagccagctggtaatccccaagaaagggaaggaggtaattatataatggttatgacagatccaattgcagatatgctaactcgtattcgcaatgcaaacatggtacgtcatgagaagcttgaaattcctgcttctaaattgaaaagagaaattgctgaaattttaaagcgtgaaggtttcattcgtgacgttgagttcgtagaagacagcaaacaaggtatcatccgcgttttcttgaaatacggacaaaacaacgagcgcgttatcactggtcttaaaagaatcagcaagcctggtttgcgtgtttatgctaaatctaatgaagtaccccgcgtacttaacggtcttggaatcgcgattatttctacatcacaaggtgttttaacggacaaagaagcccgtgcaaaacaagctggtggagaagttctagcatacgtttggtaagaagtttaacatgaatggaggtgtttggtatgtctcgtgtaggtaagaagctacttgagattccttctgatgttacagtaacgttaaatgataacaacactgtagctgtgaaaggaccaaaaggagaattaactcgtacgtttcaccctgatatggagattaaagtagaggacaatgtgcttacagtcgctcgtccttctgatcaaaaagagcaccgtgccctgcatggtacgactcgcagtctgcttggcaacatggttgaaggtgtatctaaaggatttgaaagaggtttggaattagtcggtgtcggttaccgtgcttctaaatccggaaataaacttgttttaaacgttggatactctcatcctgttgagatcgttcctgaagaaggcatcgaaatcgaagttccttctcaaacaaaagtagttgtaaaaggtacagacaaagaacgcgtaggagctattgctgctaacatccgcgctgtacgttctccagagccttacaaaggtaaaggaatccgctacgaaggtgaagttgttcgccgtaaagaaggtaaatctgctaagtaagatcgcttaaagtgaagaaaggagtgacctagatgattacgaaaactagcaaaaatgctgctcgtcttaaaagacacgctcgtgttcgcgctaaactttccggtactgctgaaagaccgcgcctgaacgttttccgttctaacaagcacatttacgctcaaatcatcgatgatgtaaatggtgtaacacttgctagtgcatctactctcgataaagacttgaacgttgaaagcactggagatacttctgctgctactaaagttggagaattagttgcaaaacgcgctgctgaaaaaggcatttctgacgtagtatttgaccgtggcggatacttataccatggacgtgtaaaagctttggctgatgccgctcgtgaagctggacttaaattttaataaaagaaggagggacacatgattatgcgtcgtattgacccaagcaaattagagttagaagaacgcttagttacggttaaccgcgtagcgaaagttgttaaaggtggtcgtcgtttccgcttcgcagctctagtcgttgtcggtgacaaaaacggacacgtaggattcggtactggtaaagcacaagaagtaccagaagcgatccgcaaagctgttgaagatgcgaaaaagaatttgattgaagtaccaatggttggaactacaattccacacgaaatcatcggacgtttcggtgcaggtaacatcttgttaaaacctgcttctgaaggtactggagttatcgctggaggccctgtacgtgcggtacttgagctagctggtgtagctgatatcctttctaagtctttaggttctaacacaccgatcaacatgattcgtgcaacacttcaaggtttaagtgagcttaaacgtgctgaagacgttgcgaagcttcgtggaaaatctgtagaagaactgttaggataaggagggaacattaatggctaaattagaaattaccctcaaacgaagtgtaatcggtcgcccggaagaccaacgcgttactgtaagaacacttggtttaaagaaaacaaaccaaactgttgttcatgaagacaacgctgcgatccgtggtatgattaataaagtatctcatttagtttctgttaaagaacaataaaaatatttgatcggataaggaggtgtcctaatgaaacttcatgaattaaaaccttcagaaggttcacgtaaaacgcgtaatcgcgtaggtcgtggtattggttctggcaacggtaaaacagctggtaaaggtcacaaaggtcaaaacgctcgttctggcggcggtgtacgccctggattcgaggggggacaaatgcctttattccaacgtcttcctaaacgcggtttcactaacatcaaccgcaaggaatacgctgtagtcaacctagacaaattgaacggttttgcagaaggaacggaagtcactcctgaacttcttctagagactggtgttattagcaaacttaatgcaggagtaaagattcttggcaacggtaaattagagaaaaaattaactgtaaaagccaataaattctctgcttctgcgaaagaagctgttgaagctgctggcggtacagctgaggtgatctaacttgtttaaaacaatctccaactttatgcgtgtgagtgatatcaggaataaaatcatattcactttactcatgcttatcgtctttcgcataggtgcgtttattcctgtgccttacgttaacgctgaagcgttacaggcacagtctcaaatgggtgtttttgatctccttaatacatttggcggcggtgcgctttaccaattttccattttcgcaatgggaattactccttatatcacggcttcgatcatcattcagctgcttcagatggatgtggtaccgaagtttaccgagtggtctaagcaaggtgaagttggccgccgtaaattagctcagttcacaaggtactttacgattgtgcttggtttcatccaagcgttaggtatgtcatatggattcaacaatctggcaaacggtatgctgatcgaaaaatccggtgtatcgacatatcttatcattgctttagtgctcactggcggaactgcctttttaatgtggcttggggaacaaattacttctcatggagtaggcaacggaatatcgatcattatcttcgcggggattgtgtctagtattccaaaaacaattgggcaaatatatgagactcaatttgtcggcagcaacgatcagttgtttattcatattgtgaaagtcgcacttcttgtgattgcgattttagcagttattgttggagttattttcattcagcaagccgtacggaaaattgcgattcaatatgctaaaggcacaggtcgttcacctgctggcggaggtcagtctacacaccttccattgaaagtgaatcctgcaggggttattccggtaatctttgcggttgcgtttttgataacgccgcggacgatcgcgtcattctttggaacaaacgatgtgacaaagtggattcaaaacaactttgataatacgcatccggtgggtatggcgatatatgttgcgttgattattgcctttacgtacttttatgcttttgtacaggtaaaccctgaacaaatggctgataaccttaaaaaacagggtggctatatcccgggggttcgtccagggaaaatgactcaagatagaattacgagcattttgtatcgacttacgtttgtgggttctatattcttagccgtgatttccattcttcctatctttttcattcaattcgctggattgcctcaaagtgcacaaattggcggaacatctttgttaattgttgtcggggtagccttggagacaatgaaacaactagaaagccagttggtgaaacgaaactaccgtggatttatgaaaaactagaggaaatggatttatccattccctcttaataaagagaggacgggggaaatccgaatgaacttagtcttaatggggcttcctggtgccggtaaaggcacacagggcgaacgaattgttgaggattatgggattcctcatatctcaacaggagatatgttccgtgctgctatgaaagaagaaacaccactcggactcgaagcaaaatcttatattgataagggagagctcgtacctgacgaagtcacaatcggaattgtaaaagagagacttggcaaagatgattgtgaaagaggttttcttctggacggatttccgcgaacagtcgctcaagccgaagctcttgaagaaattcttgaggaatacggcaagccgattgattatgtcattaacattgaagtcgacaaagatgttctgatggaacgtctgactggacgcagaatttgcagtgtttgcggcacaacctatcatttagtctttaatccgccgaaaacgccgggtatttgtgataaagacggaggcgaactctatcaacgggcagatgataatgaggaaacagtctctaaacggcttgaggtaaacatgaagcaaactcagcctttactcgatttctattcagagaaaggttatcttgcaaacgtgaatggccagcaggacattcaagacgtttatgcagatgtgaaggatcttcttggaggattaaaaaaatgattatctgtaaaaccccacgtgaacttggtatcatgcgggaagcagggcgaatcgtggctttaactcatgaagagttaaaaaagcacattaaaccaggaatctcgacaaaagaattggatcaaattgccgaacgttttattaagaagcagggtgcaatcccatcttttaaggggtataatgggtttcgcgggagcatttgcgtatcagttaatgaagaactcgttcacggcatacctggcagcagggtgctgaaggacggtgacatcatcagtattgatatcggtgctaaattaaatggttatcatggtgactctgcatggacatatccggtaggaaacatcagcgatgatgacaaaaaacttctggaagtgacagaggagtctttatataaaggcttgcaggaagcaaaaccaggtgaacgtttgtcgaatatttcccacgcaatacaaacgtatgtcgaaaatgagcagttttcagttgttagggagtatgtcggacatggtgttggtcaagacttgcatgaggacccgcaaattcctcattacggtccgcccaacaaaggaccacggcttaaacctggcatggttctcgctattgaacctatggtgaacgctggcagccgctacgtgaaaacattggctgataactggacggttgtaacggtagatgggaaaaagtgtgctcattttgaacatacgattgcgattacggaaacgggttttgatatactgacgagagtctagatgatgaaaataattccgaagacagatgtttttcaagcttgatagggcagaaagcttgggtgaacattggcaagaccgaattcatcttgctgcttgtcgttggaattttaaccatcatcaatgtactaacagcagacggagaaaagcgtacatttcattctcctaagaaaaagaatatcaatcatttaaccctttatgattgcgtatctccggaagttcagaacagtataaacgaaacagggcgtgtgacaaacttcttttgaaatttgtcagaaagcaagttactgatttgaagaagggagaacacttgaatggcgaaagacgatgtaattgaagtggaaggtactatagtcgaaacactgccaaacgcgatgttcaaagttgaacttgaaaatggccacactgttttggctcatgtatctggtaaaatccgcatgcacttcattcgcattttacctggagacaaagttacggtagaattatctccatatgacttaactcgtggcaggattacgtaccgttacaaataaagcactccggaaactgaaggaggttggaaacacatgaaagtgagaccatcagttaaaccaatctgcgaaaaatgtaaagttattcgcagaaaaggaaaagtaatggtgatctgtgaaaatccaaagcataaacaaaaacaaggataatttataaggaggtgcccagagaatggctcgtattgctggtgtagatatcccacgtgacaaacgtgttgttatttctttaacatacatcttcggaattggccgcacaacggctcagcaagttttaaaagaagctggagtttcagaagatactcgtgtgcgcgatcttactgaagaagaacttggtaaaatccgtgatattattgacaaactgaaagtagaaggtgaccttcgccgtgaagtttctcttaatatcaaacgtctgatcgaaatcggaagctaccgcggaatccgtcatcgcagaggattacctgttcgcggacaaaactctaaaaacaacgcgcgtactcgtaaaggtccgcgtcgtactgtagctaacaagaaaaaataagtaagggaggttcttaaacaatggctgctgctcgtaaatctaacacgcgtaaacgtcgcgtgaaaaagaatattgagtctggaattgctcatattcgttcaactttcaataacacgatcgttacgatcactgacactcatggtaatgctatttcttggtctagtgccggagctttaggattcagaggttctcgtaaatctactccttttgctgcgcaaatggctgcagaaacagctgctaaaggttcaatcgaacatggtcttaaaactctagaggttactgttaaaggacctggttcaggccgtgaagctgcaatccgtgcacttcaagctgctggactagaagtcactgctatcagagacgtaactcctgttcctcataacggatgccgtccaccaaaacgtcgccgcgtgtaatttgtttgtatagattttgtgtccctgtcaataatgggttatgatacagttatttatgaaacgaatgcaccgactcgttgcctgagcacatacgggactaaacaatggggaatttcggatggaatctcatatgattctattcgaggtttcgacgttttgaaggagggttttaagtaatgatcgagattgaaaaaccaaaaatcgaaacggttgaaatcagcgacgatgccaaatttggtaagtttgtcgtagagccacttgagcgtggatatggtacaactctgggtaactccttacgtcgtatcctcttatcctcactccctggtgccgctgtaacatcaatccagatagatggtgtactgcacgaattctcgacaattgaaggcgttgtggaagatgttacaacgattatcttacacattaaaaagcttgcattgaaaatctactctgatgaagagaagacgctagaaattgatgtacagggtgaaggaactgtaacggcagctgatattacacacgatagtgatgtagagatcttaaatcctgatcttcatatcgcgactcttggtgagaatgcgagtttccgagttcgccttactgctcaaagaggacgtgggtatacgcctgctgacgcaaacaagagagacgatcagccaatcggcgtgattccgatcgattctatctatacgccagtttctcgtgtatcttatcaggtagagaacactcgtgtaggccaagttgcaaactatgataaacttacacttgatgtttggactgatggaagcactggaccgaaagaagcaattgcgcttggttcaaagattttaactgaacaccttaatatattcgttggtttaactgacgaagctcaacatgctgaaatcatggttgaaaaagaagaagatcaaaaagagaaagttcttgaaatgacaattgaagaattggatctttctgttcgttcttacaactgcttaaagcgtgcgggtattaacacggttcaagagcttgcgaacaagacggaagaagatatgatgaaagttcgaaatctaggacgcaaatcacttgaagaagtgaaagcgaaactagaagaacttggactcggacttcgcaaagacgattgactagtttcccttgtgaactaggattttcgtgtgtttattattcagaaacagcattccaataaaggaggggacatcacatgtcatacagaaaactaggacgtacgagtgcacagcgtaaagctatgcttcgtgatcttacaactgatttgatcatcaacgaaagaatcgaaacaactgaaacacgtgcgaaagaacttcgctctgtagttgaaaaaatgatcacgcttggcaaacgcggtgatcttcacgctcgccgtcaagctgctgcatacatccgcaacgaggttgcaaacgaagaaaataaccaagatgcacttcaaaaattattctctgacattgcaactcgttacgaggagcgccaaggcggatacacacgtattatgaagcttggtcctcgccgtggtgacggagcaccaatggcaattatcgaattggtttaatcacatatttttgtgtatctaaagaagggcgggacagtttctaactggatctatgccctttttttagatactgcaacttttaatagagagaaaagcagagcattagctgagaggaggccggttttccatgaatcaaaatcagttgatatcggtagaggatatcgtatttcgatatcggaaggacgcagaaagacgagcactagacggcgtctccctgcaggtgtatgagggtgaatggcttgcaatcgtaggtcataacggttcagggaaatcaacactggcccgggcattgaatggtttaattcttcctgaatcaggcgacattgaggttgccgggattcaattgacagaggaatctgtttgggaagtgcgtaagaagataggtatggtctttcaaaatccggataaccaatttgtcggaacgactgttcgcgatgatgtggcttttggtttagaaaacaatggtgtaccgcgggaagaaatgattgagagagtagactgggcagtaaaacaggtgaatatgcaagattttctcgatcaagagccgcaccatctctccggaggccaaaagcagagagttgcgattgcgggggttattgccgcacgtcctgatattattatcttagatgaagcaacatccatgcttgatccgatcgggcgagaagaagtgcttgaaacggtaagacatttaaaagagcagggcatggcgactgtcatatccattacacatgatctgaatgaggcagcaaaagcagacaggatcattgtcatgaatggcggtaaaaaatatgctgaagggccgcctgaagagatttttaaattgaataaagaacttgttcgaattgggcttgatttacccttctcattccagcttagccagcttttaagagaaaatggactggctttggaagaaaaccatttgactcaggaagggctggtgaaagagctgtggacattacaatcaaagatgtagagcatcgctatcagatgaagacgccgtttgagcgcctagcactgtatgatatcaatgcatcgattaaagaaggaagctacgtagccgttatcgggcatacaggctctggcaagtccactcttcttcagcacctaaatggtctcctgaagccgacgaagggacagatatcactaggcagcactgtcattcaggcagggaaaaagaataaagatctgaaaaaacttcgtaaaaaagtcggaatcgttttccaatttcctgagcatcaattattcgaagaaacagttcttaaagatatttcattcggaccgatgaactttggtgttaaaaaagaagatgctgaacaaaaagcgagagagatgctgcagcttgtaggtttatcagaagagcttttggacaggtcaccctttgaattaagcgggggacaaatgcgcagagttgcaattgccggcgtacttgcaatggaccctgaagtgcttgttctcgatgaaccgactgcaggattggacccaagagggcgaaaagagattatggacatgttttatgagcttcatcaacgtgggaacctgacgacgatccttgtgacacacagcatggaggatgcagctgcatacgctgatgaaatgattgttatgcataaaggaatgatacaagcatcaggcagtccgcgtgatctgtttttaaagggtgaagagatggccggctgggggctggatcttcctgaaacaataaaattccaaagacaccttgaagctgtactgggtgtgagatttaatgagcctatgctcacaatcgaagatgccgctgccaaaatccgtgctctttttcagggggagaagactttatgatggacagcatgattatcggcaagtatgtaccgggtacttcacttgtgcaccggcttgaccccagaacaaaactgatcacgatctttttatttgtctgcatcgtattcttagccaataatgttcagacatatgcgttgcttggtttatttacaattggcgtcgtttctttaacaagagttcctttctcttttttaatgaaagggctgaagccaatcatctggattgtcctttttacgttccttcttcacatccttatgacacatgaaggaccgattatctttcaaataggttttttcaaagtctatgagggcggtctggttcaggggatattcatttctcttagattcgtctatttgattttaatcacaaccttattaacgcttacgaccacaccgattgagattaccgatggaatggaacagctgctgaacccattgaaaaaattaaagcttcctgttcatgagctggctcttatgatgtcaatttctttacggtttattccgacactgatggaggagacagataagatcatgaaggctcagatggcgcgaggcgttgattttacaagcgggcctgtcaaagatagagtgaaggctattgtcccgcttcttgtcccgctcttcgtcagcgcatttaaacgcgccgaagagcttgcggtggcaatggaagcaagaggctatcaaggcggagaaggacgtacgaaatatagaaagcttgtatggacaggaaaagacacttctgtcattgtcagcttaattgtattagctgctttgttatttttcttaagggcttagaggtgctgtatgagactgaaatgcacgatttcttatgacggacatttgtttaacggttatcaggttcagccgggcaaaagaacggttcaggatgaactggagaaggctttggctgtcctgcataagtcaaaagacagaattccggttgtttcgtctggaagaacagacagcggggttcacgcagccggacaggtgattcattttgacactccgctgtctatcccggctgagagatggccatatgccttaaatgcactgcttccggacgatatcgcagtcaaacaggcagaaattgcggatgatgggttccatgcacgatttagcgcagtcaaaaaagaatatcgctactttgtatacacggagaaacacccggacgtatttaaacggcattacgcttaccatttttcatatcgccttaatgtgcaggacatgagagaagcggcaaagcatcttatagggacacatgattttacgagcttttgcgcggctaaaacagaagtgcaggacaaggtaagaacgatatacgaacttgattggactgagacggctgacggcctgcaaatgcggatcacaggcagcggtttcttatataatatggtcagaattattgcgggtactttgcttgatgcaggtattggaaaaatttctcccgatgaggtgaaatccatgctggaagcgaaggatcgcgaagcggcagggcgcacagcgccggggcacgggctatatttatggaacgtttactatgacaactaaaccaggtgtataatattttcttgacagagtctgcataaagttataagatatcatatggtatgtatttcaaccccacgataagccccggaacttattgtgttgtgaaatagaacgtaatcgaagtttattgaaaatgacagatcatttaggagggaaattcaatgcgtacaacacctatggctaacgcaagtactattgaacgcaagtggttagttgttgatgctgctggcaagactttaggtcgtctttcttcagaagttgcagctatccttcgcggaaaacacaaaccaacttacacaccacacgttgatactggagatcatgtgatcatcatcaacgctgaaaaaatcgagttaactggtaaaaagttaactgacaaaatctactaccgtcacactcaacatccaggcggattaaaatcaagaactgctcttgaaatgcgtacaaactaccctgagaaaatgcttgagcttgctatcaaaggcatgcttccaaaaggttctctaggtcgtcaaatgttcaaaaaattgaacgtataccgtggttctgagcatccacacgaagcacaaaaacctgaagtttacgaacttcgcggttaattaaaaaggaggttaccaatttggcacaggttcaatattacggtactggccgtcgtaaaagctctgtagcgcgtgtgcgtttagttccaggagaaggccgtatcgtcgttaataatcgtgaaatcagcgaacatatcccatctgcagctttaatcgaagatatcaaacaaccattaactttgactgaaacagctggcacttatgatgttttagtaaacgtacatggaggcggcctatctggtcaagctggagcaatccgtcacggtatcgctcgtgctttgcttgaagcagatccagaataccgtacaactcttaaacgtgcaggtcttctgactcgtgacgctcgtatgaaagaacgtaaaaaatacggtcttaaaggcgctcgtcgtgcacctcagttctcaaaacgttaattttacgttttcaaaaagctctcgaccttgggttgggagcttttttctttcaataaaacgtggcagcctcgcataaaaataacaactgaatggacgtttggcggggttaagcaaattgtttgtttataaacggtctctttgtaataatcatgttagctttcattcttattcaattggaacttcggtcaatgtttattatcgttatgtgctcagcccagcttcatctaaccactgtatctcatccgttaaagttcactgctgattcttaacccggagaaacaatagctctcattgctaatggctttatgtaacgaagtaaaagtaaatctgatgatataaatcacatatctcctttgtgatttttttgcgtttttatgaacttttttctaaatatgcaaagggaaagcgatatcaatctagaaatatttgttatactctatacattaaagtaaggagaagattcatgaatgcgttagtagctcataatagcaaagcctgggataaaaaagtagaaacaggcaatgaatggactgttgctgttgagcagcaggttatcgaacaagcaaaaaaaggcaattgggatataagggtaacaccaatgaaagatgtaccgaaggattggtttccgcctatcaaaggtctgaaagtactctgtttagcatcaggcggcggccagcagggtccagttttggcagccgcaggcgcggatgtcaccgtattagataactcagaaaaacaactgaatcaggataaaatgattgctgagcgagatggtctcacgatacacactgtcaaaggaagcatggacgatttaagtgtatttaatgatgaatcatttgatgtcattgtacatcctgttgccaatgtttttgttgagaatgtcctcccggtatggaaggaagcgtaccgtgtgttgaaaaggaacggcattctaatctcgggttttgtcaatcctgttgtatttctgtttgatacagaattagaacagcaaggtgttttaaaagtaaaacactccattccatacgctgacccagaagatcttccgaaacataaagtgaaaaaactgatcgaaaataatgaggctctggaattcggtcattccttagaagaccaaatcaaaggccagattgatgccggttttatcgttactggtttttatgaagataaaggcgggtttgtattagaccaatatatccatacatattctgcaacaagaagcgtgaaagtatgaaaagcagcgacctgttagaggggctgcttttttcataaccaattacagaacgtttgttccgcaccctgcggaaagctgattttttatcgattttacaccttcatttgggcgaatttccaaccgaattcgggcattgtttcatcatccaaacctcaaaataatcggtaaaaggagagtgaatttatatggcagaagtactgtcttttatggatgtgaaacgccaaaaggattttgaattagaaaagaacttgctcaaagaactctctctgagacaaattatccagtctgttaaggattgtttggaaccattatttccatttttacatgatgaacgagatattattactgaaggctgtattgattttgcgattgaagcttatttgttaggcgggcgttttgggatattcggctattacggagaatccatgcagagtatcagtgcccgctctgcaagagaagaagaagagctacgtatggagttttttgattatctctataattggatacacgagcaatacgcaacatttgataaaaacacggtttatgaagcggcacgcaagttcattaaagattggtggacagcggggtttgttcaaagagaaaaacagtgtaagcttcgcatgcgataatcatatttcccggccctgtcccatagttatgtaataacggacaagcgggaggggaagggatgaggaaaaagcttaaatggctcagttttttgctaggcttcatcgtattactatttctgttcaaatatcagttcagcaataacgactcttggaagccgtggagcttgcccttgagcggtaaaatcatttatctagatccaggtcatggcgggcctgacggcggagcagtcggcggaaagctgttagagaaggatgttaccctggaagtggcctttagagtcagggattatcttcaagaacaaggagcgcttgttatcatgaccagagaaagtgatactgatctcgctccagaaggaacaaaaggctatagtcgacgaaaagctgaggatctaagacaacgagtcaaattaataaaccattcagaggcggagctctatatcagcattcatcttaatgcgattccgtcacaaaaatggagcggagcccaaagcttttattacgggaaatatgcggaaaatgagaaagtcgcaaaatacatccaggatgagctgagaagaaatctggaaaacacaacccggaaagcaaagcggattcatggtatctacttaatgcaaaacgtcaccaaaccgggggcgcttatagaagtcggatttttatccaatccaaacgaagcaacgctactcggtaaaccgaaatatcacgacaaggtggcatcttccatatataaaggcattttgcgatatttcacagaaaaaggagaccctccggagtaatggagggttttcttgtggttctaagcataagacacccgccatttatgtatgatataataataattgtaaacgaatacacaaaagggtgaggttcgatgataagagaagatgaagtaagaaaactagtcggagaaatgcgcgaaccttttcttcaaagacctctgggagaattggatgccgttaaggaaattaaaataaagcctgaaaaacggcatatcagtgtaaaagtcgctcttgcaaaaacaggaactgcagaacaaatgcagattcagcaagagatcgtaaacgtattaaaaggggcaggagctgagacagtcggccttcgatttgaagagctgcctgaagaaacggttgctaaattccgggcgccgtcagctgagaaaaaaacattattaaatatggataacccgccagtctttcttgctgtagcaagtggaaaaggcggcgtaggcaagtcaactgtgtcagtaaacctagctatttctctggctcgtctagggaaaaaggttggtttaattgatgcggatatttatgggttcagtgtgccggacatgatgggtatcactgtgcgtccaacaattgaaggagagaaacttcttcctgttgaacgctttggagtaaaggtcatgtcaatgggctttttcgtagaagaaaatgccccggtcgtatggagagggcccatgctcggcaaaatgctgaataattttttccatgaagtagagtggggagaagtagactatatcgttcttgatcttccgcctggtacaggggacgttgctctcgatgtacatacaatgcttccgagctgcaaagaaattatcgtatctacgccacatccgacagctgcttttgtcgcggccagagcgggctctatggcgattaaaaccgatcatgaggtcgtgggtgtcatagagaacatggcttattatgaaagtgcaaagacaggggaaagagaatatgtgtttggaaaaggcggaggagataaactggctgaggaactaaacgtgcctttgctcggcagaatcccattgaaacagcccgattgggataaggaccaatttgctccgtctgtttatgacgaaaatcatccaatcggagaaatatatcaggacatcgcaaaaaaaatagatgcaaaaatgtcagtgcaggtataaaaggtgaaccgggattccagatcccggctttccctttattcactttcttttgctgtgtcttttgctgcttttttcagctcatcttcgaactgctttttgtaaagcggactagaaagtgtttcgttaataacctcttctaaataactgcggaattcttggctttttgccagctggctgtactttttatccatgccgggatcctgcataacgctcatcagcatcttctggtaatctggatccttcatcagctttttaatcactttttcatgctctgtctgaagagttttggcaaagccctcagcaaaatcagtgtcttcaaagatgtttttccaaaattcttcaccttttttagatgtgagtgttttttctattgttcctttaattgcatcttggtcaatcaccagcgcttcattcatggcatcatcatttaataattccttaatagctttctttccatcatcagtttttaatatatcaacaaccatttttttggtctgatcatagtccatatccgttgcttggtcttttggagcgcaagctgttacagataataacaaaaaacagctcatcaatagcgttttggcttttgacatgcttaagctcctttcacatacttgtcttacctttaatatgattcatctgtttggaattatacataacaaaatatcgctgttcgcgatttttgaggggatgaataaagaaatgaaaagccgtggtttagttcgttttttcttttctattttagctgtcggggcgcttatcacgagtattgtgggttttgctttaaagtggggagaatatagagggctgtttctaacatttgaagcgggacagattttctctgttttattttggtttatcggtgtaggcatgattttcagtgtgatcagccaaatgggttttttcgtgtttttaacagttcatcggtttgcgcttgagatattaaggtcctcctctttgtggaatttgctgcagttgtttttcatcctgtttgttgcttttgatttaatgtacgtgcgttttttattttttggagagagcggagaatcgctggctggctatgcgtggttaccggtgtttttattgatctttggagtgattacagcttatataaagcaaaagcagtcctctaagaaaacatttgtgtcatcgttatttttgatggttgtgattaccgcattagaatggttccctgcattaagagtaaatgatgaggactggctttatttaatgctttttccgttaatggcatgtaatgccttccaattgctgatgctgccgaagtttgcagcaaagtaattactttacctctgcggatttggcatcagaatttgcgatgagatcacccacggttacattttttaatcctttttctttcagctgatggatgatatcaggcaatgcttcttctgtttgttttgcagaatcggaggcatgtaaaagaataatgtctccaccggaaacttgcttggtcacattgtcgatgattttttcaactccgggatttgtccagtcttgagagttcacactgtaatgaacgactgtataattgtattgctttgcgacctttagaacattcttattgaattggccggtagggggtcttaatagctgtatgtctttgacccctaacttttcaaaggctgtttgcgcacggttcatgtccttttttatttcgctgctctctaaattggcatagtttttataagcgtagcccatgctcccgatttgatggccgtcctttacgatacgggccactgtgtcgggatggcgttctgcccaagaagcggacaggaaaaacgttgcgtttttaatcccgtttgctttcagagtattaagtatcggttctgctctctcatcaccccagctgatatcgaaagtaagtgaaatatctttagagtctgtttctcctttataaatggctttaggtccggtgtcagttgaaaacacgggaagcgggacagctctttggatataaaaaaagctggcagctgcaaatgcggcgataagtataataattaattgttttacccgtttaatgtgccacacatagaagtgattcactgatgatgcctccttatcttgtccatcattcttgttttacatcttatgagcatggacaattgaatataaccgataaaatgtctcttcacatacagcctaaattgggtgttgaccttttgataatatccgtgatatattattattcgtcgctgataaacagctgacatcaactaaaagcttcattaaatactttgaaaaaagttgttgacttaaaagaagctaaatgttatagtaataaagctgcttcgttaagcggcagtaatgatctttgaaaactaaacaagacaaaacgtacctgttaattcatttttataaatcgcacagcgatgtgcgtagtcagtcaaactagggcctgtacgatgcaggtcacacaggtgtcgccgcaggatgcggtgaacttaacctgtgatccatttatcggagagtttgatcctggctcaggacgaacgctggcggcgtgcctaatacatgcaagtcgagcggacagatgggagcttgctccctgatgttagcggcggacgggtgagtaacacgtgggtaacctgcctgtaagactgggataactccgggaaaccggggctaataccggatggttgtttgaaccgcatggttcaaacataaaaggtggcttcggctaccacttacagatggacccgcggcgcattagctagttggtgaggtaatggctcaccaaggcaacgatgcgtagccgacctgagagggtgatcggccacactgggactgagacacggcccagactcctacgggaggcagcagtagggaatcttccgcaatggacgaaagtctgacggagcaacgccgcgtgagtgatgaaggttttcggatcgtaaagctctgttgttagggaagaacaagtaccgttcgaatagggcggtaccttgacggtacctaaccagaaagccacggctaactacgtgccagcagccgcggtaatacgtaggtggcaagcgttgtccggaattattgggcgtaaagggctcgcaggcggtttcttaagtctgatgtgaaagcccccggctcaaccggggagggtcattggaaactggggaacttgagtgcagaagaggagagtggaattccacgtgtagcggtgaaatgcgtagagatgtggaggaacaccagtggcgaaggcgactctctggtctgtaactgacgctgaggagcgaaagcgtggggagcgaacaggattagataccctggtagtccacgccgtaaacgatgagtgctaagtgttagggggtttccgccccttagtgctgcagctaacgcattaagcactccgcctggggagtacggtcgcaagactgaaactcaaaggaattgacgggggcccgcacaagcggtggagcatgtggtttaattcgaagcaacgcgaagaaccttaccaggtcttgacatcctctgacaatcctagagataggacgtccccttcgggggcagagtgacaggtggtgcatggttgtcgtcagctcgtgtcgtgagatgttgggttaagtcccgcaacgagcgcaacccttgatcttagttgccagcattcagttgggcactctaaggtgactgccggtgacaaaccggaggaaggtggggatgacgtcaaatcatcatgccccttatgacctgggctacacacgtgctacaatggacagaacaaagggcagcgaaaccgcgaggttaagccaatcccacaaatctgttctcagttcggatcgcagtctgcaactcgactgcgtgaagctggaatcgctagtaatcgcggatcagcatgccgcggtgaatacgttcccgggccttgtacacaccgcccgtcacaccacgagagtttgtaacacccgaagtcggtgaggtaaccttttaggagccagccgccgaaggtgggacagatgattggggtgaagtcgtaacaaggtagccgtatcggaaggtgcggctggatcacctcctttctaaggatattatacggaatataagaccttgggtcttataaacagaacgttccctgtcttgtttagttttgaaggatcattccttcgaaacgtgttctttgaaaactagataacagtagacatcacattcaattagtaatacaagatatcacatagtgattctttttaacggttaagttagaaagggcgcacggtggatgccttggcactaggagccgatgaaggacgggacgaacaccgatatgcttcggggagctgtaagcaagctttgatccggagatttccgaatggggaaacccaccactcgtaatggagtggtatccatatctgaattcataggatatgagaaggcagacccggggaactgaaacatctaagtacccggaggaagagaaagcaaatgcgattccctgagtagcggcgagcgaaacgggattagcccaaaccaagaggcttgcctcttggggttgtaggacactctgtacggagttacaaaagaacgaggtagatgaagaggtctggaaaggcccgccataggaggtaacagccctgtagtcaaaacttcgttctctcctgagtggatcctgagtacggcggaacacgtgaaattccgtcggaatccgggaggaccatctcccaaggctaaatactccctagtgaccgatagtgaaccagtaccgtgagggaaaggtgaaaagcaccccggaaggggagtgaaagagatcctgaaaccgtgtgcctacaagtagtcagagcccgttaacgggtgatggcgtgccttttgtagaatgaaccggcgagttacgatcccgtgcaaggttaagcagaagatgcggagccgcagcgaaagcgagtctgaatagggcgcatgagtacgtggtcgtagacccgaaaccaggtgatctacccatgtccagggtgaagttcaggtaacactgaatggaggcccgaacccacgcacgttgaaaagtgcggggatgaggtgtgggtaggggtgaaatgccaatcgaacctggagatagctggttctctccgaaatagctttagggctagcctcaaggtaagagtcttggaggtagagcactgattggactaggggcccctaccgggttaccgaattcagtcaaactccgaatgccaatgacttatccttgggagtcagactgcgagtgataagatccgtagtcgaaagggaaacagcccagaccgccagctaaggtcccaaagtatacgttaagtggaaaaggatgtggagttgcttagacaaccaggatgttggcttagaagcagccaccatttaaagagtgcgtaatagctcactggtcgagtgactctgcgccgaaaatgtaccggggctaaacgtatcaccgaagctgcggactgttcttcgaacagtggtaggagagcgttctaagggctgtgaagccagaccggaaggactggtggagcgcttagaagtgagaatgccggtatgagtagcgaaagaggggtgagaatcccctccaccgaatgcctaaggtttcctgaggaaggctcgtccgctcagggttagtcgggacctaagccgaggccgaaaggcgtaggcgatggacaacaggttgatattcctgtaccacctcctcaccatttgagcaatggggggacgcaggaggatagggtaagcgcggtattggatatccgcgtccaagcagttaggctgggaaataggcaaatccgtttcccataaggctgagctgtgatggcgagcgaaatatagtagcgaagttcctgattccacactgccaagaaaagcctctagcgaggtgagaggtgcccgtaccgcaaaccgacacaggtaggcgaggagagaatcctaaggtgatcgagagaactctcgttaaggaactcggcaaaatgaccccgtaacttcgggagaaggggtgctctgttagggtgcaagcccgagagagccgcagtgaataggcccaggcgactgtttagcaaaaacacaggtctctgcgaagccgtaaggcgaagtataggggctgacgcctgcccggtgctggaaggttaagaggagcgcttagcgtaagcgaaggtgcgaattgaagccccagtaaacggcggccgtaactataacggtcctaaggtagcgaaattccttgtcgggtaagttccgacccgcacgaaaggcgcaacgatctgggcactgtctcaacgagagactcggtgaaattatagtacctgtgaagatgcaggttacccgcgacaggacggaaagaccccgtggagctttactgcagcctgatattgaatgttggtacagcttgtacaggataggtaggagccttggaaaccggagcgccagcttcggtggaggcatcggtgggatactaccctggctgtattgaccttctaacccgccgcccttatcgggcggggagacagtgtcaggtgggcagtttgactggggcggtcgcctcctaaaaggtaacggaggcgcccaaaggttccctcagaatggttggaaatcattcgcagagtgtaaaggcacaagggagcttgactgcgagacctacaagtcgagcagggacgaaagtcgggcttagtgatccggtggttccgcatggaagggccatcgctcaacggataaaagctaccccggggataacaggcttatctcccccaagagtccacatcgacggggaggtttggcacctcgatgtcggctcatcgcatcctggggctgtagtcggtcccaagggttgggctgttcgcccattaaagcggtacgcgagctgggttcagaacgtcgtgagacagttcggtccctatccgtcgcgggcgcaggaaatttgagaggagctgtccttagtacgagaggaccgggatggacgcaccgctggtgtaccagttgttctgccaagggcatcgctgggtagctatgtgcggacgggataagtgctgaaagcatctaagcatgaagcccccctcaagatgagatttcccattccgcaaggaagtaagatccctgaaagatgatcaggttgataggtctgaggtggaagtgtggcgacacatggagctgacagatactaatcgatcgaggacttaaccatatttttgaatgatgtcacacctgttatctagttttgagagaacactctcaatttgtttggtggcgatagcgaagaggtcacacccgttcccataccgaacacggaagttaagctcttcagcgccgatggtagtcgggggtttccccctgtgagagtaggacgccgccaagcagatttattaattctaccatgtttgtttatgaagctttatattattccgcagtagctcagtggtagagctatcggctgttaaccgatcggtcgtaggttcgaatcctacctgcggagccattgcttccatagctcagcaggtagagcacttccatggtaaggaagaggtcagcggttcgagcccgcttggaagctttatttaatgtattattaccaaggtttctcataaggagaaagctttttttattgcgatatgcggaagtagttcagtggtagaacaccaccttgccaaggtgggggtcgcgggttcgaatcccgtcttccgctccatttatcccaacgggatattgtaaattgaattgcgcccgtagctcaattggatagagcgtttgactacggatcaaaaggttaggggttcgactcctctcgggcgcgccatatcttttaatagaatagatgggaaatcgggaagtagctcagcttggtagagcacatggtttgggaccatggggtcgcaggttcgaatcctgtcttcccgaccattttttatggggccttagctcagctgggagagcgcctgctttgcacgcaggaggtcagcggttcgatcccgctaggctccaccaaaagtttttaaaaagttgttgactttgaagaagtgacgttgtatactaataaagttactttaacaaagcaaataaacaaaatgatctttgaaaactaaacaagacaaaacgtacctgttaattcagtttttaaaaaatcgcacagcgatgtgcgtagtcagtcaaactactttatcggagagtttgatcctggctcaggacgaacgctggcggcgtgcctaatacatgcaagtcgagcggacagatgggagcttgctccctgatgttagcggcggacgggtgagtaacacgtgggtaacctgcctgtaagactgggataactccgggaaaccggggctaataccggatggttgtttgaaccgcatggttcaaacataaaaggtggcttcggctaccacttacagatggacccgcggcgcattagctagttggtgaggtaacggctcaccaaggcgacgatgcgtagccgacctgagagggtgatcggccacactgggactgagacacggcccagactcctacgggaggcagcagtagggaatcttccgcaatggacgaaagtctgacggagcaacgccgcgtgagtgatgaaggttttcggatcgtaaagctctgttgttagggaagaacaagtaccgttcgaatagggcggtaccttgacggtacctaaccagaaagccacggctaactacgtgccagcagccgcggtaatacgtaggtggcaagcgttgtccggaattattgggcgtaaagggctcgcaggcggtttcttaagtctgatgtgaaagcccccggctcaaccggggagggtcattggaaactggggaacttgagtgcagaagaggagagtggaattccacgtgtagcggtgaaatgcgtagagatgtggaggaacaccagtggcgaaggcgactctctggtctgtaactgacgctgaggagcgaaagcgtggggagcgaacaggattagataccctggtagtccacgccgtaaacgatgagtgctaagtgttagggggtttccgccccttagtgctgcagctaacgcattaagcactccgcctggggagtacggtcgcaagactgaaactcaaaggaattgacgggggcccgcacaagcggtggagcatgtggtttaattcgaagcaacgcgaagaaccttaccaggtcttgacatcctctgacaatcctagagataggacgtccccttcgggggcagagtgacaggtggtgcatggttgtcgtcagctcgtgtcgtgagatgttgggttaagtcccgcaacgagcgcaacccttgatcttagttgccagcattcagttgggcactctaaggtgactgccggtgacaaaccggaggaaggtggggatgacgtcaaatcatcatgccccttatgacctgggctacacacgtgctacaatggacagaacaaagggcagcgaaaccgcgaggttaagccaatcccacaaatctgttctcagttcggatcgcagtctgcaactcgactgcgtgaagctggaatcgctagtaatcgcggatcagcatgccgcggtgaatacgttcccgggccttgtacacaccgcccgtcacaccacgagagtttgtaacacccgaagtcggtgaggtaaccttttaggagccagccgccgaaggtgggacagatgattggggtgaagtcgtaacaaggtagccgtatcggaaggtgcggctggatcacctcctttctaaggatattatacggaatataagaccttgggtcttataaacagaacgttccctgtcttgtttagttttgaaggatcattccttcgaaacgtgttctttgaaaactagataacagtagacatcacattcaattagtaatacaagatatcacatagtgattctttttaacggttaagttagaaagggcgcacggtggatgccttggcactaggagccgatgaaggacgggacgaacaccgatatgcttcggggagctgtaagcaagctttgatccggagatttccgaatggggaaacccaccactcgtaatggagtggtatccatatctgaattcataggatatgagaaggcagacccggggaactgaaacatctaagtacccggaggaagagaaagcaaatgcgattccctgagtagcggcgagcgaaacgggattagcccaaaccaagaggcttgcctcttggggttgtaggacactctgtacggagttacaaaagaacgaggtagatgaagaggtctggaaaggcccgccataggaggtaacagccctgtagtcaaaacttcgttctctcctgagtggatcctgagtacggcggaacacgtgaaattccgtcggaatccgggaggaccatctcccaaggctaaatactccctagtgaccgatagtgaaccagtaccgtgagggaaaggtgaaaagcaccccggaaggggagtgaaagagatcctgaaaccgtgtgcctacaagtagtcagagcccgttaacgggtgatggcgtgccttttgtagaatgaaccggcgagttacgatcccgtgcaaggttaagcagaagatgcggagccgcagcgaaagcgagtctgaatagggcgcatgagtacgtggtcgtagacccgaaaccaggtgatctacccatgtccagggtgaagttcaggtaacactgaatggaggcccgaacccacgcacgttgaaaagtgcggggatgaggtgtgggtaggggtgaaatgccaatcgaacctggagatagctggttctctccgaaatagctttagggctagcctcaaggtaagagtcttggaggtagagcactgattggactaggggcccctaccgggttaccgaattcagtcaaactccgaatgccaatgacttatccttgggagtcagactgcgagtgataagatccgtagtcgaaagggaaacagcccagaccgccagctaaggtcccaaagtatacgttaagtggaaaaggatgtggagttgcttagacaaccaggatgttggcttagaagcagccaccatttaaagagtgcgtaatagctcactggtcgagtgactctgcgccgaaaatgtaccggggctaaacgtatcaccgaagctgcggactgttcttcgaacagtggtaggagagcgttctaagggctgtgaagccagaccggaaggactggtggagcgcttagaagtgagaatgccggtatgagtagcgaaagaggggtgagaatcccctccaccgaatgcctaaggtttcctgaggaaggctcgtccgctcagggttagtcgggacctaagccgaggccgaaaggcgtaggcgatggacaacaggttgatattcctgtaccacctcctcaccatttgagcaatggggggacgcaggaggatagggtaagcgcggtattggatatccgcgtccaagcagttaggctgggaaataggcaaatccgtttcccataaggctgagctgtgatggcgagcgaaatatagtagcgaagttcctgattccacactgccaagaaaagcctctagcgaggtgagaggtgcccgtaccgcaaaccgacacaggtaggcgaggagagaatcctaaggtgatcgagagaactctcgttaaggaactcggcaaaatgaccccgtaacttcgggagaaggggtgctctgttagggtgcaagcccgagagagccgcagtgaataggcccaggcgactgtttagcaaaaacacaggtctctgcgaagccgtaaggcgaagtataggggctgacgcctgcccggtgctggaaggttaagaggagcgcttagcgtaagcgaaggtgcgaattgaagccccagtaaacggcggccgtaactataacggtcctaaggtagcgaaattccttgtcgggtaagttccgacccgcacgaaaggcgcaacgatctgggcactgtctcaacgagagactcggtgaaattatagtacctgtgaagatgcaggttacccgcgacaggacggaaagaccccgtggagctttactgcagcctgatattgaatgttggtacagcttgtacaggataggtaggagccttggaaaccggagcgccagcttcggtggaggcatcggtgggatactaccctggctgtattgaccttctaacccgccgcccttatcgggcggggagacagtgtcaggtgggcagtttgactggggcggtcgcctcctaaaaggtaacggaggcgcccaaaggttccctcagaatggttggaaatcattcgcagagtgtaaaggcacaagggagcttgactgcgagacctacaagtcgagcagggacgaaagtcgggcttagtgatccggtggttccgcatggaagggccatcgctcaacggataaaagctaccccggggataacaggcttatctcccccaagagtccacatcgacggggaggtttggcacctcgatgtcggctcatcgcatcctggggctgtagtcggtcccaagggttgggctgttcgcccattaaagcggtacgcgagctgggttcagaacgtcgtgagacagttcggtccctatccgtcgcgggcgcaggaaatttgagaggagctgtccttagtacgagaggaccgggatggacgcaccgctggtgtaccagttgttctgccaagggcatcgctgggtagctatgtgcggacgggataagtgctgaaagcatctaagcatgaagcccccctcaagatgagatttcccattccgcaaggaagtaagatccctgaaagatgatcaggttgataggtctgaggtggaagtgtggcgacacatggagctgacagatactaatcgatcgaggacttaaccatatttttgaatgatgtcacacctgttatctagttttgagagaacactctcaatttgtttggtggcgatagcgaagaggtcacacccgttcccataccgaacacggaagttaagctcttcagcgccgatggtagtcgggggtttccccctgtgagagtaggacgccgccaagcaattgcacgttagtgtaattttttaaaaaaagttgttgactttgaagaagtgacgttgtatactaataaagttgctttaacaaagcggacaaacaaaatgatctttgaaaactaaacaagacaaaacgtacctgttaattcagtttttaaaaatcgcacagcgatgtgcgtagtcagtcaaactactttatcggagagtttgatcctggctcaggacgaacgctggcggcgtgcctaatacatgcaagtcgagcggacagatgggagcttgctccctgatgttagcggcggacgggtgagtaacacgtgggtaacctgcctgtaagactgggataactccgggaaaccggggctaataccggatggttgtttgaaccgcatggttcaaacataaaaggtggcttcggctaccacttacagatggacccgcggcgcattagctagttggtgaggtaacggctcaccaaggcgacgatgcgtagccgacctgagagggtgatcggccacactgggactgagacacggcccagactcctacgggaggcagcagtagggaatcttccgcaatggacgaaagtctgacggagcaacgccgcgtgagtgatgaaggttttcggatcgtaaagctctgttgttagggaagaacaagtaccgttcgaatagggcggtaccttgacggtacctaaccagaaagccacggctaactacgtgccagcagccgcggtaatacgtaggtggcaagcgttgtccggaattattgggcgtaaagggctcgcaggcggtttcttaagtctgatgtgaaagcccccggctcaaccggggagggtcattggaaactggggaacttgagtgcagaagaggagagtggaattccacgtgtagcggtgaaatgcgtagagatgtggaggaacaccagtggcgaaggcgactctctggtctgtaactgacgctgaggagcgaaagcgtggggagcgaacaggattagataccctggtagtccacgccgtaaacgatgagtgctaagtgttagggggtttccgccccttagtgctgcagctaacgcattaagcactccgcctggggagtacggtcgcaagactgaaactcaaaggaattgacgggggcccgcacaagcggtggagcatgtggtttaattcgaagcaacgcgaagaaccttaccaggtcttgacatcctctgacaatcctagagataggacgtccccttcgggggcagagtgacaggtggtgcatggttgtcgtcagctcgtgtcgtgagatgttgggttaagtcccgcaacgagcgcaacccttgatcttagttgccagcattcagttgggcactctaaggtgactgccggtgacaaaccggaggaaggtggggatgacgtcaaatcatcatgccccttatgacctgggctacacacgtgctacaatggacagaacaaagggcagcgaaaccgcgaggttaagccaatcccacaaatctgttctcagttcggatcgcagtctgcaactcgactgcgtgaagctggaatcgctagtaatcgcggatcagcatgccgcggtgaatacgttcccgggccttgtacacaccgcccgtcacaccacgagagtttgtaacacccgaagtcggtgaggtaaccttttaggagccagccgccgaaggtgggacagatgattggggtgaagtcgtaacaaggtagccgtatcggaaggtgcggctggatcacctcctttctaaggatattatacggaatataagaccttgggtcttataaacagaacgttccctgtcttgtttagttttgaaggatcattccttcgaaacgtgttctttgaaaactagataacagtagacatcacattcaattagtaacacaagatatcacatagtgattctttttaacggttaagttagaaagggcgcacggtggatgccttggcactaggagccgatgaaggacgggacgaacaccgatatgcttcggggagctgtaagcaagctttgatccggagatttccgaatggggaaacccaccactcgtaatggagtggtatccatatctgaattcataggatatgagaaggcagacccggggaactgaaacatctaagtacccggaggaagagaaagcaaatgcgattccctgagtagcggcgagcgaaacgggattagcccaaaccaagaggcttgcctcttggggttgtaggacactctgtacggagttacaaaagaacgaggtagatgaagaggtctggaaaggcccgccataggaggtaacagccctgtagtcaaaacttcgttctctcctgagtggatcctgagtacggcggaacacgtgaaattccgtcggaatccgggaggaccatctcccaaggctaaatactccctagtgaccgatagtgaaccagtaccgtgagggaaaggtgaaaagcaccccggaaggggagtgaaagagatcctgaaaccgtgtgcctacaagtagtcagagcccgttaacgggtgatggcgtgccttttgtagaatgaaccggcgagttacgatcccgtgcaaggttaagcagaagatgcggagccgcagcgaaagcgagtctgaatagggcgcatgagtacgtggtcgtagacccgaaaccaggtgatctacccatgtccagggtgaagttcaggtaacactgaatggaggcccgaacccacgcacgttgaaaagtgcggggatgaggtgtgggtaggggtgaaatgccaatcgaacctggagatagctggttctctccgaaatagctttagggctagcctcaaggtaagagtcttggaggtagagcactgattggactaggggcccctaccgggttaccgaattcagtcaaactccgaatgccaatgacttatccttgggagtcagactgcgagtgataagatccgtagtcgaaagggaaacagcccagaccgccagctaaggtcccaaagtatacgttaagtggaaaaggatgtggagttgcttagacaaccaggatgttggcttagaagcagccaccatttaaagagtgcgtaatagctcactggtcgagtgactctgcgccgaaaatgtaccggggctaaacgtatcaccgaagctgcggactgttcttcgaacagtggtaggagagcgttctaagggctgtgaagccagaccggaaggactggtggagcgcttagaagtgagaatgccggtatgagtagcgaaagaggggtgagaatcccctccaccgaatgcctaaggtttcctgaggaaggctcgtccgctcagggttagtcgggacctaagccgaggccgaaaggcgtaggcgatggacaacaggttgatattcctgtaccacctcctcaccatttgagcaatggggggacgcaggaggatagggtaagcgcggtattggatatccgcgtccaagcagttaggctgggaaataggcaaatccgtttcccataaggctgagctgtgatggcgagcgaaatatagtagcgaagttcctgattccacactgccaagaaaagcctctagcgaggtgagaggtgcccgtaccgcaaaccgacacaggtaggcgaggagagaatcctaaggtgatcgagagaactctcgttaaggaactcggcaaaatgaccccgtaacttcgggagaaggggtgctctgttagggtgcaagcccgagagagccgcagtgaataggcccaggcgactgtttagcaaaaacacaggtctctgcgaagccgtaaggcgaagtataggggctgacgcctgcccggtgctggaaggttaagaggagcgcttagcgtaagcgaaggtgcgaattgaagccccagtaaacggcggccgtaactataacggtcctaaggtagcgaaattccttgtcgggtaagttccgacccgcacgaaaggcgcaacgatctgggcactgtctcaacgagagactcggtgaaattatagtacctgtgaagatgcaggttacccgcgacaggacggaaagaccccgtggagctttactgcagcctgatattgaatgttggtacagcttgtacaggataggtaggagccttggaaaccggagcgccagcttcggtggaggcatcggtgggatactaccctggctgtattgaccttctaacccgccgcccttatcgggcggggagacagtgtcaggtgggcagtttgactggggcggtcgcctcctaaaaggtaacggaggcgcccaaaggttccctcagaatggttggaaatcattcgcagagtgtaaaggcacaagggagcttgactgcgagacctacaagtcgagcagggacgaaagtcgggcttagtgatccggtggttccgcatggaagggccatcgctcaacggataaaagctaccccggggataacaggcttatctcccccaagagtccacatcgacggggaggtttggcacctcgatgtcggctcatcgcatcctggggctgtagtcggtcccaagggttgggctgttcgcccattaaagcggtacgcgagctgggttcagaacgtcgtgagacagttcggtccctatccgtcgcgggcgcaggaaatttgagaggagctgtccttagtacgagaggaccgggatggacgcaccgctggtgtaccagttgttctgccaagggcatcgctgggtagctatgtgcggacgggataagtgctgaaagcatctaagcatgaagcccccctcaagatgagatttcccattccgcaaggaagtaagatccctgaaagatgatcaggttgataggtctgaggtggaagtgtggcgacacatggagctgacagatactaatcgatcgaggacttaaccatatttttgaatgatgtcacacctgttatctagttttgagagaacactctcaatttgtttggtggcgatagcgaagaggtcacacccgttcccataccgaacacggaagttaagctcttcagcgccgatggtagtcgggggtttccccctgtgagagtaggacgccgccaagcaagcttaaacccagctcattgagctgggttttttattttatatctgtgccgatttgcttttatcagtatccattttatcaagcttctgctttttaagttttctaatacttttgaatccaatacaatcaccagcatgatcaacatgagagtcataaataatcaaaatgcagtttgtacgggagactcatccagactccatccgtctgcaattggcagaatagagccgccaatccattggcagcgagcagcatgcctgtcgtttgttctgtttttccatgatgaaattgattggtgacaattaagataatggcgaacatgctggccataaataagtcctaagaaaaaactaagaataatccctgcaaaagctgttttattgattgccaaaatacagagttaaatgaggccgctcatatttatcagcctgagataatgatgataggttattttttcggaaaccggctcgggttgccaaatgagagaaaagatattactgtcattaaaacgattcttggtttcatccggatatgataaaatgtctcagactatatttgagccatttttttcttcagcaatcatcttgcgtaattgataaaaatttattatgatactctttgtatgacaactccttgcctcaatacaatatactcaacgtttccccgttttctccggtcgtttttcttttcattttctcccgtaaaataaaaaaagctcccaatacaatagatatggtgcggatttattttttactaaaaaggagtcgttatatttgaataatagttttacattaaaacagcaatggttcgggaatatccgaaaagacattcttgctggcattttagttgcgttagcgttaatacctgaagcgattggcttttctattatagccggtgtggatccgatggtcggtctttatgcgtcattttgcatagccattattatttctatttttggcggcagacctggcatgatttcagctgcgacaggctcaatggcagttgttatggtgtcgctggttgctgatcatgggcttcagtatttatttgcagctacgattttgactggcattattcaagtgattttaggtatcagtaaaattgcaagattaatgaaattcatcccgcgttctgtgatgatcgggtttgtgaatgcgctggcaatccttatcttctctgcgcagcttccccagtttgaaggtgcttcttggagcatgtatgcgatgcttgccgggtcgttggttattatttatgtgctgccaaggtttacgactgctgttccgtctccgcttgtggcgattattgtgatgacaattattgcggtcactttccatgtggatgtgcggacggttggtgatatgggcaatatttctagttcattgcctcatttcttaatccctgatgttccgtttacctttgaaacactgcaaattatttttccttattcaattgctttagcgtttgtcgggttgcttgaatctttgctgacagcacagattattgatgaaatgacggatacggatagtgataaaaataaagagagccgcggacagggaattgcgaatatcgtgactggattctttggcggaatggcaggctgcgctatgatcggacaatctgtcattaatacaaaagcgggcggtcgcggacgtttgtcagcatttgttgccggtgcttttctgatgtttttaattgcggtgttaagtcatgtcgtggtgaaaatcccaatggcggcgttagtggctgtaatggttatggtgtctgtcggcacttttgattggtcttctttaaaaggtctcaaaaaagcgccgctcacggactcgattgtcacggttgtgactgtggttacggttgttgtgacagatgacttatctaagggtgtatttgtcggtgttcttttaagtgccgtgttctttgtagcaaaaatctcgaagctgaaaatcgtttctcatgcagaggatcaaaagcttagaacgtatcaagtgaaggggcaaatcttttttgcgtcagtgactgatcttacgaatgcgtttatatatcaagaggatattgagcgggttgtgattgacttaactgaagctcacgtatgggacgattctggtgcggccgcacttgataagattgttgcgaagtttaaggaacaaggcattgaagctgagttaaaaggtttgaataaagcgagtaaatctctaatgaaacagatggcataaaatagagaagcccagatgaatgagatctgggcttttttatataacatacacttaagcagcattgatataatagagagaagagaaattttaaataggggacttgcatatgatgcttcagaagctgaaccgtgtattggggagagtgatgccgctgttaacgccgactagtgtggtgttgggcgtgctgctgtctcagtttttaaatgggtatgaatgggctgtaccttggatctttgcttttattacgtttgcaggcagtttgagcgcgaactttcaatctttgagacatgcattgtctcatcctctccctatgattcttgcactattcgttcttcatattttcatgccgctttttgcttggggcagcggccatcttatatttaaaggtgatcctttgacgattaccggtttaacattggctgttgtgattcctacggggattacaagcttgatttgggcagcgatgtacaaagggaatgtcggtttgacactttcgattattttaattgatactgtgctgtcaccgctaatcgtaccgctgagtctttcattgctggccggcgctcaggttcatatggatgtgtggggaatgatgaaaggtctgattgtaatggtcgtgattccttcttttctgggcatgctgtttaatcagatgtcatctccagaaagaactgcgtctgtgagcagtgcgctgtcgcctttttcaaagctttgcttgatggcagtgattgcgattaacagttcagcgattgctccttatttcaaatccattgatttgagatttgcaggaatagctgtaacggtattctttatcgcgttaacaggctatgccgctgcttggctgatcggaaaaatgatgaaaaggcggcaagaggaaatagtctctcttatatttacgggaggcatgaggaatattagtgccggcgcagttcttgccgttacgttcttcccgtctcaggttgccgttcctgttgtgatcggcatgctgtttcagcagatattggctgctttgtttggctatatgctgaatcgttttgaattaaaaccaatgttgcagaaagcataaaaaaaccgctcatagggttgagcggttttttccgtatagccattcgagcgcgttgatgaactgtttgcagaaatacttgcggtggtgcaccgctcctttttcaattgaaagatacaaccggtcttcagtgaagcctttttcttttagactttgatgaacttgctttgtttttttcagcatatgtcgctgaatggattgtttttcacggccttcttcactcccgacagacatgaaaacacgtgtagtgccgggctttaaagaagatatatgaatggtttccgctgcgttctcgtaccagtatgaacctgatatagagcctattttcccgaacattgacggatattttaataaggcgaacattgagatgaggccgcctaatgaggcaccgatcattcctcttgactgcggttccctgatgacgttccagttttcttcgattagcggaatgaactggttcgttatatcagacagatagtgatatcccattccgccgaagtccgtgaaccgatcactgagtgatgcagccggccaaggtgtgtattcatttagccggttttcgggttcgataccgatcagcacgagttcagggagcctttgctgttgatatgcgctttctaataattcgatttggttttggaacaaagaactgccatcctgcacgtaaacagcaggaaatcccccgctgtctgtgctgtaggaaggagggaggtacagcgtgaacctcctgttgccggctttgtgttctgaaagagatcctttcaagcattctccccctttttttgcttgaaaagcagatataagaaataaggaactccgaggatcgccaaaatgatgcctgcgggcacttctgcgggctgaaaaaacagttttccggcaaagtctgcgcttatcacaagaagcatcccgattaaaccgctcagtggcaggatatagcgatgttcgacgccagccagtctccgtgagatatggggagcaattaagccgacaaacgccatacttcccgctacggagacacaggcgctgatgattgctacacaggctacgagcaggatggttttttctttatttgatgaaatgccgaggcttctgactgtgtcttcatcaaaacgaatggtgtcgagcaggcgggatttgccgataagaatcggtataaacagcagcatccatgggagaacggctgtgatatacgtccagttggcagaccagatgcttccgtttttccacaccatggccatttgatagtcttgcgggtccatttttaaagataaaaacaaagacagggcgctgaatcctgaattgatcgcaatccctaccagaataattcttcctgaatctaaattgcctctgtgccatgcaaatatgtaaatcaggatcgccgcgatgagcccgcctatcaatccaaagagcggcattcccatcgctgcagctatggatgtcacttccttctggccttggaataagagcataaacgctacaatgccggctcctgcccctgcgttgattccgagaattccaggatcagcaagcccgtttctcgtgatggcctggataacagcgcctgcaatgccaagaccgagtccaataatagcagccatgacaacccgcggcagccttaaatcgaacagcaaaatttcatactgcggattcgggtagatttgaaaaagagtggagagcagctcagcaggacgaacagaaaatgatccgctcgttaagctgaaataactgacaacaagaatcaaagcgatgaacaatgcatattttttagccattttgctcccctccttttcgtttaattaaataaaggaagaaaggtacgccgataatggatgttacgacctcaatcggtgtttcaaacggatagttgataaatctgcttgcgagatcacacagggttaaaaagattccgcccaaaatacaggagcacggaatcagcctgctgtaatcagagccgacgagaaatctcgtgatatgcggaacaaccaatccgacaaacgcaatttttccggccagcgctacggcactgccggttaaaatgatgacggaaagcatcgccatgattttaatggtttttttcttttgccccaggcttttagaaatgtcgtcccctaatgatacagcggttacctttttgctgagagaaatggccattataatgccaatcaggaaaaacggagcggcgagcttcaggaaatccggactcatttgatgaagtctggcactgtaccagaaactgagatcctgagaaatttgaaaataaatcgacatggccgctgataagctgctgagcagcatgcttgtgactgtgccgatgatggcgagctgcacgggggtaaatccgtttggcatcatggcggcaaggccgaatactaacacagctcctaacgctgagccgataaaagagtatatcatcatttcaatcgaagatgattgcgggagcagaaccatgcaaagcgtaatgataaacgctgaaccatctgaaacacccataatggatggcgaagctaaataattgcgcgtaatgccctgcataagcgctccagaaacagcaagggctgcccctatgagcagagcgccggcagcccttggaatccgggaatgccatataatttgatggtctgtgtttcccggatcgaaatgaataagagatgtaaaaacaatatctgtgctaagatgctttgccccataaaggattgaaagtaaaagtgacagcgctatagcaaatggagaagtaatcaatatgatacgtgtccactgttttgaatacatacaaaaacctactctgaattagttttgtgtcaatttttcagcagccgctttcaggaaacggactttgctccaagctgtgccgccttgtgcgagagggtccactgagttgacatacacatggtcttctttgactgctttaaggcttttccagattggatttttctctaaatcttttaaggcatcaggtttatctgcattttcatcatcagaaaattggacgaaaatatggtccgggttcatttcacttaatttttctaatgaaatcagctcttgcgcttttgcagcttttacttcgttaggcgccttaaggcctaaatcaccgtatagtgtggagttgaaatacacctgttcagggtaaatgtaaatgttgccttgtctaattctaatgacaagcgcttttgaatctttcgctttatcgttgatttttgtttttgtttcttttagatcttgttcatagtctgcaataattttctttgcttttttctcttttccggtcagctgggcaagcagcatcatgttttccttccagtttgaagagatatgagaaactgggatcgtcgtgcctgctgtgctgattttttgcagcgttttttccggaaactttgttgaagcaaggataacatctggcttcatttcaagaatcttttcaatatttggctccattttttctccggttggttcggctttatcagtgatgtctttgaacatatcagggaatttgccggagaatgaaattgcgccttgcggatgaacgtcaagcaatttcgcgtcttccattgattcaacgcttcccgtaatggcgattttgtctgtcggtacagttacttcatatgttttatcaagatattcaattttcttcttctcagatgctgtgccgcttgccttgctggcagttgattcatttttgctgccgcaagctgccgccgtcagcgcgagaagcaagattaataaggtaagagatatctttttcatctatagagcctcctgttcaattgataactattatcaattggaattatagagaatgaacagatataacaccatggacaaattcctgatttatcatggacaatctccggatagtaaagaaacagtttgctgaacgatgcgttcgtgcccgcaagctgagtattcattccacgggtcaagggatagaagataaacacggttatctcgtaccgcgcttaggttttgccatgcttctgtctgctgtaattgctggtagtaagctatggtctccggctctttaaaaagaaaaagcatcatacagtcagcttggtaatttgcgatattttctaacgaaatcgcttgttctgaaggtgtgtcagccgttgttgccgagctgaatcctaaatccccaaagaaaacttcgcggacacttcggttatgtgccagatagaagttttgcttatgcagcctcaaaaagagaaaacgcagcccttgaacgtgctgaagtgtttttttggcggctgttgtctgctggtcataatccgctagccacttttctgcttcggactcctcctttaaaaatgaggcagtttgcagaaagtgggttctccagctttcttctgaaggaaggtacatgacttctgcgatgcgattcaggcgatcttgttcttctggagaaatagaatccatgctgacaatcacatctggttctgcctgcgataacgtgtacaggttttcttcccacttttcattaaaccggtatgcactgagctggacgggtatatctgtcgaataatgctgatagtagtaagacgtccatttcggatgcagagcggccgcaaaaggtatgtggtgaagagggatgagatggcccattgtgccccttccgtatgcggcgattttctttcggcgttttttcatatagcttgtaggtgaacagcctgtatattttttaaagattctgctgaaataaaattcatcttgataaccggtttggtgtgcgatttctttcaatttgcagtttgattttgccatgagccgttttgcctttgtgattcgtgttttcgtaataaattctgttacgctctgtcctgtccattttttaaagctttcactgtagtgtttggcactgattcctgccatttgcgacagctgggcaagcgtgatttttgtatcggcatgtgtttcgatatagtgttttgttttttcgattgctgaatgtgtatccgtttgatcagataaactggcagtaaaaagatcataaatcaggctttgtacttcaatcacacattttagctgagaaagctgagacgattcattccatagtgcggcaagctcttgaagccggactgcaagattttcgatatgtgaaacattcataagcttcagtttggctaattccgattctgtgcacggtgtgtaaatatcttggccggcttccttgatatagctttgaagcctgatcagacaggcatctatatgtccatcggctgctggcataaagccaaaggtctcgttaggcggacaaacataaagtgtctttttttgcagaggattggtgtttgttccgatcgaaatatagccgtttccttttaaatgaaaaatcagcacgaatgaatcggctaattgctgttctgagaagagatcacttgtcttttttagatattcaatttgtatcggttgataaatcactgcattttgcacgagtagaccaccttttcagaagctttcaattgataatcattttcaataaaaattgtaccaaataaatgaaagttttcctatataaagcgggtgggtttttagcatgaaaaaaacccttacttatgtgtaaaagtaagggtctttcgttcagtaagaatatgttacacgtgtaacatacgatgcttacgttctaataaatgagatatttttttcttgttttgctgaattgttggagtgttttttcatagctgtttatgatgccctcaaccgaagttccattttcaatttttgtcctgatccagccgttgcctgccagtttatcgaatgaacctgttgacaggaactcaaaatcctcaggatagagatcgtgtatggttttaatgactgaaagacccgttttaacggcttcaaacttatctctgtctgtcacatagagctgcacaccgtggcaaagcgttccttgatgtttagaaaacgtcggtgtgaaggatgctgccctaaatgttacgcccggcaaatggaggctgtttaatgtttcttcaagttctgtgcttttgataaagggagctccgatcaattcgaatggctttgttgtccctcgcccttcggatatatttgttccttcaatcagcccggttgcaggataaacaaatgtgctttccaccgtcggcatgttaggcgaagggaggacgaaaggcaatcgggtatcgtcaaaatccatttttcgtttccagtgtttcatttttaccactgtaagatcggcatcaatatcaaattctttgttgaacagtaaagccaattcgcctatcgtcatcccatgcttcaatggaatgggatacaatccgacaaatgaggcgtattcaggttctaagattggcccttcaatatgattcccgccttggggattcggacggtctagcaccataaatggaatgccgttttctttagcggcttccattgcgtatgccattgtataaatgtacgtgtagaaacgggtcccgacatcctgaatgtcaaacattagaatatcgacatttttcagcatttctggagtcggttttttcgtttttccgtagaggctgtatacgggaaccccggttttttcgtcaatgtaagagcctacttcgtctccagcctgggcgtcaccgcggacgccgtgttcagggccgaataaagctgtcagtttgatatctgggttctcgtaaagaatatcgacactgcttttcagagatgcgtttactccggttggattggtgatcagtccgatgcgttttcccttgagctgttttttatagtctggcaagagcgtgtctatcccagtctggactttaggttttttagccgtttgattctttgaatcgggtgaagcagaggcagcggttatcgttccgaacatcatgagccctgtcagaaaagcgaatattgtttttctcatgtgtccctccttattaaagcggtcttcccgttttgatatttaatccgtagccatatggataaagggtgtcccccgggttcgtgactgatgggatgttaactggaagtgtgcctttaggttttgcctggccgaaaatcgccatcactccggccggaatattaggttgaagataacggccatttgcgtatcctttaaagccatagactgcaatcagtgcctttgcttcttcgaaattggcggcatcatatgggttgcgcaggctcattaagacaaatggtttgttgtgctgcagtgcggctttcatgacagctctcggaaacacggtggcccatttgcttgaatctgatattgtgtcgtcgatgacaccgtcgttgacgacagggtcatttttgacgacataggagccggttatgatataatcagccttttttacttgttttgcatgctcggcattaaatacttggttggcaaaattcattttgtcgacagatacgggtttgattttctttcgcttgatgagatcgtgaatggtttgttcgattgaagcagtttgttcttcgtaaggtgccacaattaagattcggctgccttttttaggcttgaacggcaaagtgtgctgttcattttttaatacagttactgctttttcagctatttttttctctgttttcaggtgctgctggcttcctacgatttttttggctttggctattttttcttttgtactgtcgctgtttcgtgctggatacatgccgcgttttattttcagggaaatgattctttcaactgatttgttgatttgttgttcaggaatatccccgtttttcacggcttctttcaaagcttgaatgacacgtgcgaatttctgttcttctttcattgaagtgactgaggctggcattaatgcaatatcgacaccagcttttacggccatgaccacagcctcctcctgtccgaaatgatctgcaattgccttcatattgagcgcatcggtaacgatgaccccattaaagcccatttcctgacgaagaagacctgtcatcactttttgcgaaagtgtagctggaaccagaatgtccgatccatcgagtttgcttttgtatgtggtgtcgtcgaaggcagggaattgaacatgggctgtcatcaccatatcagcaccagcatcaattgctttttgaaaaggataaagctcgacctcacgaagccgttcttggccatgggaaacgagcggcagtccataatggctgtcaacgtccgtgtctccatgtcccgggaaatgtttgagggcagacgcgatatcctgccgctgcaaccctttcatcgtatatagaccgaggcgtgatgtcagttctcgattggagctgaatgaccgtacgccgattacaggattatcaggattattgttaatgtccacgacagggctgaaatctgtattgatgcctaaggcagagagctctttcccgatgatgctgccggtctgatacgcattgattctgcttctggctgcgcccagcgccatattccctgggaaattagtgccctcccctaacctcgttacaatgccgccttcctgatcaatactcagcatgagcgggatttttggacttgccttttggtaatcgtctgtcagttggacagtttgttttgttgtttttacattttctgcaaaaaggatgatgcctccgaattgatatttcttgacgaggctggcgacttcatcattcatttctgtaagggcttgcggagaggactcgccttccttttgccaatttctaaaatcaggcatcagcatctggccgagtttttcatctaacgacatacgattgacaatctgattggcatcgattgaacgtttggatgcagaggcttctgtctgtctggccccgaaaaagcatgaaagaaagagaacggctgaaaggataagcggaaagacaggtctcatagaaacttcctcctatcgtctaatcattcactccatcgcttcataaatcgcggttatgacacttccataactgcctgttgcaaattgatcaccctcaaagacgtttggattttcttccggatcaataactggtgtatgctttttatttgttaacaatgcgatgcctaaattgtatgctggatcaataattgtaactgtccctgtccagccggtatgcccgtaagcattttcactggcatgagggccaaacatccattccacgcttttacttccgttccgcctccagccaagagcgaatgtcgggtctgttgctgaaggtgctgtaaacaggtcggctgttttctgatcaaataaagaaatgtttcggtatgaacctttgtttaacatgacttgcagcagtatggccatatcatctgcatttgagaacaatccggcatgcccagacacgccatccattgagtaaaacgctttttcgtcatgcacctctccttgcagcgtgtttgtgcggatgttagggaattgaataacgccgtcacgtgtattgcccattcgttcagtagctgcgaactgtttcggtttaaagcccttttgcagcggattgtacaaggtatgcttcagcctgagcggtttgtagagctcttgctccgtgtagacatcaagcggtttgccagtgagtttttcgacaatacacccaagtagaatatatccaatgtcactgtatacgtgttttgtcccggtttgataatcgagcggaattttcgtcaaatattcaatcgttttgtcccgttcttgggaatagtacttaccggctttttccggcgtgtaaaagtaaaagcttgatgggagtcctgattggtgctggaggacatcgatgacacgtatcttgtcttttccttttatgaggtcacccggctgatccttgaaacccggcaaatatgcagaaactttttcatagacgtcaagttttccttggctgactaagcgctgcaatgcaaaatttgttgcgtacatttttgtatttgaggctaagtcaaacatcgtgcgggttttcattttggccggacggcgcagcagttctgatccttcgtactttttactgtagccgtatgctgctttttttatgatgcgtccatccttcaccaccacaagaacggcgcctggaaatcctgctgcaatatcccgttctatcatctgatctaccttctttagcttcttcgtcgagaattgtgcagtttctgcatttatggttttcggctcaaccaagttgtctgctgtttgtgcgaaggtttcatttggcgcgaatatcgatagggttaaaatggcactgaatatgaacagtgtctttgttttcacaggctagcccctttctgtgcttctatcccgtttactatccctaaaacagaaacaatttaatcgaactgagaagccatttcatctttatatccgaatgcataggtcaataaaaagccggccgcgtaggaaataaagagcccaacgatatacaggatgatttgcgaaggcaggactagaaaggaaagcggcagtccggagacaccaatcgcaatggtggctacttgaaaataagcttgaaaggcgccgccgattccagctcctaaacatgctgttaaaaacggacggccaagcggcagcgtgactccgaaaataagcggttcaccaatgccgagcagtcccgatggaagcccgccggcgattgctttcctcagtgttgtttttttcgtcttcacgaaaacggcaaaggccgcgcctacctgtcctgcacctcccatagccaaaatagggagcagaggatcattgccaattgaattgatcagttccatgtgcacaggcgtcaagccttgatgcagtccggttacgacgagaggaaggaaggttgcgcccagaataaagcccgcagcgatgccgccgatgtccaggatggacagtaggccggatgtaatagcatcagaaatgaatccgcctaaaggcataaatacgacatacgttacgattccggtgattaacagtgaaacggtgggtgtgacaatgatatcaagtgattgaggaataaaacggcgaataaattgttcggtgtaagcaatgaatatggctgcgaaaaggacgccgatcagacctcccctgcccgggagaagctcttctccaaataaactgatttttgcgatctccggattgataatcaagatcccggccaaagccccaagtgcgggtgtcccgccaaattctttcgaagcgttaataccgacgagaatgccgagataagtgaacagccctgatccgatgactgtcaggataatcgcaatttgtgagtctgcagagagccagcctgcttgaataattgctttggtaatcccagtaattaaaccggaagcgactagagcgggaataagagggataaaaatgctggcaattttacgtaagaaaagtttaaaaggagtggcatttttccgattgatatcggctttctttttggccgctgcttctttgacatcggcaccttcttctgctgacacgagctttgagaaagcagctgtaacatgattgacgactcctgtgccgaggataatttgtaaggtttcagcttcaacgacccccaatacgccgtcaagctttcttaaaccctgagcatctgctttgctttcatcgtaaggcgtaatgcgcaggcgtgtcatgcaatgcgtatatgaagaaatattggattttcctccgcatagctcaaggattttctgtgcgagatgatggtagttattttctttgctcattaaaacccctccccttcaagatgccttatttttttctcatagattggatggctgctctcgttttatcgatataaccggttgtcgtttcatactgctcagccgccatgcctaaaaacaaaacatcaattataaaaagctgggcgaggcgggaggaagtggccgcacttcgaatcaaggcttcattggaatgggctgtatacaaagggacatcagccagtgcggagacggatgtctgactgaattgtgtgaggctgatcgttgtgatgcctttttccttggccatggcaaacagttcaatgatttcctgtgtctctcctgaaaacgaaatggcgaatacgatgtcgtctttatctgcatttgcaattaaagatgccacaagatgagtgtctgtaaacgcggttgcttgtttatgaatgcgaagccacttttgctgggcgtccttggcgacaatgccggaagcccccaggccgataaaatgcacggtatgagctttgagaagcagagaaaccgctcgttcaagctctttgtagtccatcaggtctgaagtatcctgaatggcttgaatggcattgccggccgttttttcggaaatggagggcagcggctcgtggggaacaatatcccggtagccctgaaacgtaggctttgccagatcgcccgctactctcatttttaaatcttgaaatccttttaaaccgagtgatttgcagagcctgatgacggcagcgtcacttgaattggctaaggcgctgatttcgttgaccgtgctttcgattgctttgtggggatgggctaggatataatctgcaagtttgcgctcggatggagggagcttatgcttcattgattggatgatggctaaaccgcctgtggccattctagttctctccttatcatggatggtaatgttcgattgctttgtcaatgaaaccgtttgcttcatcgagtaatgtctttgcttgtttctgatctgtgcttgttttgagcatgacgattgctgttttgacgtgatgatcggcttgttccagagtgtatctggctgtgtcgtatgaagcgtttgtaaggctttggataatgctgatggcgcgttcttttagttttttgttgctgacgttgacgtctaccatcaagttttcgtaaaccttgccgattttgaccattacagcggtagatatcatgtttagaatcattttatgagcggttgcggctttcatacgtgttgatcctgtaatggcctcaggtccgacgacaacctcaatgctgtgatccgcatccttgctgatggcggaattttcattgcaagtaagggcgatggtgtgtgctccgactttgcgggcgtatcttagggcgcctgcggcgtagggtgtgcggccgcttgctgcgatggcaatgacggtgtcatttgaagtgagctgtatgtttcttaaatcttcagctcctgcttcatcactgtcttcaatgccctctgctgcctgtaaaaaggcttcggggcctccagctatgattccgatgacctgatctgggcttacgctgtaggtgggaggacattcaacagcatccatgacgccgagtctgccacttgtgccggcgcctgtatatatgagccggcctccattttgaaacgattcataagcgcagtctacagctgttttgatgtcggggagaacctcttgaacggctgcagcgactttcatatcttcgttgttgatcattttgaggatgccgagagtgtttgctttgtggatttcaactgtttggctattgcgtgattccgttgtgagacggtgaaggtttaatggttctgacatgaggatgccccctgttttaaaatgatatatctcaatattcagtatattcatttctgttatgatatttcaactatgtttttgaatttttgaaattttatttcactcaagtctataagaaatgatgaaggatcaactgttctccaagcgggccgattcttcgccgtcctttatcaaggaacccgcttttcatataaaggtgttttgcgcgtatgttcagatgattgacggccaagatgatttcgtcgcaccatggaaaatatccgctcacaaaagcgggaagcaaaagcatggcttttttcgcatagccttttccgtgatgcacagcgtttaaagacagggagctgagcagtaaagcaaatggattgttagaataagaagcaagcgtttcttttgatgcatgtaaaatgaaaaaaccgactggaaggtcgtcttttaagatgacaaccgggtatcggtcctgtatgcccagagcctgagacagcacctctttcgggagggaggtaaagcgtttgtcatcgttggtgagcgtgaatgattgaagctcgggcaagtgttcaggcttatagaaggataaagaaatgtcttgagtcatgtggtggcctccttacaatatgtcgtcaagctcgttttccgaaatgacgcggtagcccgcttgttttaacagtgcggcggttactccgctgccggtgatttttttaccagagaatgtgccgttatagataaaaccgcttccgcaagatggactgttttcttttaatatgacggcagaagcgttgatttcttttgcgtaagccaatgttttcgcggcgccttccatatatagttctgtgacgtcttctcctgaagctgtcacgattttcgctgttccattgagaacatcctcgccggtgcctcctatgatttctgcgggttcgcgtggggtagagaagccgccgagaagttcagggcaagccatgactgctttcttttcatcgacgagttttctgattttctccgacgctgcgtgagagccgttatatctgcattcaatgcctccaaggcaagaactgactagaatcatattgggttctcctctcttgctttacttgtctctatcataaaataaatggctttagttgggaggctttttcagttaaaaaaggagttaaaaagtttgaaaataaaaaaattaatttttctctttacaaacagggagtgacctgtatataataacttttgtcagctcgacgagaacacaacggcccgttggtcaagcggttaagacaccgccctttcacggcggtaacacgggttcgaatcccgtacgggtcaccatttggaggattagctcagctgggagagcatctgccttacaagcagagggtcggcggttcgagcccgtcatcctccaccatcttgccggtgtagctcaattggtagagcaactgacttgtaatcagtaggttgggggttcaagtcctcttgccggcactgttttttcaaaattttatgtggaggggtagcgaagtggctaaacgcggcggactgtaaatccgctccctcagggttcggcagttcgaatctgcccccctccaccattattgggctatagccaagcggtaaggcaacggactttgactccgtcatgcgttggttcgaatccagctagcccagtcacagacacctttgatcaaaaggtgtcttttttcttttcgggaaaatcattccaacttctaactgttcagtctgtataataattttaaaaatatgttaaggtagtttattcacgaattaccatctacaccctgccaaaaatttgataaacttattttataaaaaaattgaaaccttttgaaacgaagctcgtatacatacagaccggtgaaggcagaggttagataaatatggaaatgatgattaaaaaaagaattaaacaagtcaaaaaaggcgaccagaatgcatttgcggacatcgtagatatttacaaagataaaatttatcagctttgctaccgtatgcttggcaatgtgcatgaggcggaggatattgcacaggaagctttcatcagagcgtacgttaatatcgacagttttgatattaaccggaaattttcaacttggctttatcgaatcgcgaccaatttgaccattgaccgcattcgcaaaaagaagccggattattacctcgatgcagaggtggctggtacggaaggcttgaccatgtattctcaaatcgccgcagatggtgttttgcctgaagatgcagttgtgtcgctggagctctcaaacacgatacagcagaaaattttaaagcttcctgacaaatacagaacagtcatcgtattaaagtatattgacgaactctcattaattgaaatcggggagattctaaacattcctgtggggactgtgaaaacgcggattcacagaggcagagaggctcttagaaaacaattaagggatctttaagtggggtgatgaaatgagctgtcctgaacaaattgtgcagcttatgcatatgcatcttgatggagatatccttccaaaagatgaacacgtattaaataaacatctggagacatgcgagaaatgcagaaagcatttttacgagatggagaaatccatagcgctcgtacggagcacatcgcatgtcgaagcccccgcggattttaccgctaatgtcatggcaaaattgcctaaggagaagaaaagagcttctgtaaaaagatggttcagatcccatcccgttatcgcagctgctgcggtattcatcattttgatgggcgggggtttttttaacagctggcataatgaccacaatttcagcgtgtccaagcagccgaatcttgtggttcataaccatactgtgaccgtgccagaaggtgagacggtcaaaggtgatgtcactgttaaaaacggcaagctgattattaaaggcaaaatagacggggatgtaaccgtcgtaaacggcgaaaagtatatggcctctgctggacaagtcaccggtcagattgaagaaatcaatcaattattcgactggacatggtacaagatgaagtctgcggggaaaagtgtactcgatgcattcgatccgaacggagaagagtaaagcgcgttagccgctttgctctttttttgtgggctgagagggctggcacatttcacttgctaaatcgaaatgtggtataatgggctcgctatgtaaagtacatatgcgtaacacgtaaaacacaaaatacgaaatgactgaaatcttggaggacgaggaaatggcttttgaggatatcccttttttgcagtacctcggcaatgccgttgatattctccttgtttggtatgtgatatataaattgattatggtgatacgtggcacgaaagcggttcagctgttaaaaggaattgtagtcatcgtgcttgttcgtatggccagccaatatttgggcctcagcacacttcaatggctgatggaccaagcgataacatggggatttttagcaattattattatttttcagcctgagctgagaagagcgcttgaacagctaggccgcggccgctttttttcgaggagcggcacgcctgttgaagaagcgcagcagaaaacgattgaggccattacaaaagcgatcaattatatggcgaaacgccgtataggcgccttgcttaccattgagcgggatactggaatgggggattatattgagaccggcataccactgaatgccaaagtcagctctgagctgctgatcaatatttttatcccaaacaccccgcttcatgacggtgcggtaattatgaaaaataatgaaattgccgcggccgcctgttatctgccgctttctgagagcccgtttatttcaaaagaactgggcacgcgacacagagcggctgtcggtatcagtgaagtaacagacagtttgacgattattgtgtctgaagagaccggcggcgtcagtgtggcaaagaacggcgaccttcacagagagctaacagaagaggcgctgaaagaaatgcttgaagccgagtttaagaaaaacaccagagacacttcttctaaccgctggtattggaggggcaagaaaaatggataaattcttaaacaaccgctgggctgtgaaaatcattgctctgcttttcgcgctcttgctttatgtggcggttaacagcaaccaagcaccgacgccgaaaaaaccgggtgaatctttctttccgacatcaacaactgatgaagcaactctgactgatattccggttaaagcgtattatgatgatgaaaattacgtcgtaacgggtgttccgcaaacggttaatgtcacgataaaaggctcgacaagcgccgtgaaaaaggctcggcagaccaaaaactttgaaatatatgctgatatggaacatttgaaaaccggcacacataaggttgagcttaaggccaaaaacgtgtcggatgggctgacaatctcaattaatccgtctgttacgacagtgaccattcaggaacggacgaccaaaagttttcccgtagaagtggagtactacaacaaaagcaagatgaaaaaaggctattctccggagcagccgattgtcagtccgaaaaatgtgcagattaccggatcgaaaaatgtcatcgataatatttctcttgtaaaagcttcagtgaatttggaaaacgcagatgaaacgattgaaaaggaagcgaaagtgactgtctatgataaagacggaaacgcgcttcctgtcgacgtggagccctcggtcatcaagattaccgttccggtgacaagcccgagtaaaaaagtgccctttaaaattgaacggacaggaagccttcctgacggtgtcagcatagcgaatattgaatccagccccagtgaggtaacggtttacggctcacaggatgtgttggattctcttgaatttattgacggcgtcagcttagatttaagtaaaattaacaaggattccgatatcgaggcagatattccgcttcctgacggtgtcaaaaaaatctcaccgtcaaaggtgactttgcatatagaagtcgacagtgaagcggatcagaagttcgagaatgtccctatcaagactgtagggctgagcagctcacaaaacattgaatttcttgatcctgaatcacaagcgatagatgtaacggctaaaggctctcccacgaatataaaaaagctgaaaaaatcagatattgaattgtatgtgaatgtttcagatttagaggacggggagcatagcgtgaagcttgaagtgaacgggccacagaatgtaacttggtccttggggcgtaaaaacgccaaaatcaagctgacgtctaagaaaagcaatacatcaacgaatgataacagcagcaatacatcagggaaccaggacacagataaacaaacaaatgatcaaaagaacaatcagcaagaagatacaaagaacactgataaaaacaacaacgatcaaaaccaagacgaaaataaagatcaaaaccaagatcaggatgaggatgaatccactgcgaattcacaatcctcatcggaataaaaaaggagcgattataaaatgggcaagtattttggaacagacggtgtaagaggtgtcgccaatagtgagcttacacctgagctggcctttaaagtcggacgtttcggcggttatgtgctgacaaaagacaaacaacgtccaaaagtgctgataggccgcgatacacgcatctccggccatatgctggagggagcccttgtcgccggacttttatccattggcgcagaagtcatgcgcctgggtgttatttctacaccaggtgtatcttatttgacaaaagcgatggatgcagaggcgggcgtcatgatttccgcttctcataacccagtgcaggataacggcatcaaattctttgggggagatggatttaagctttctgatgaacaggaggctgaaattgagcgcctgatggacgaacctgaggataagctgccaagacctgtcggagcagaccttggacttgtaaacgattattttgaaggcggacaaaaatatctgcaattcttaaaacagacagctgatgaagatttcacaggcattcatgtggcattggactgtgccaatggcgcaacgtcatccttggcgacacacctgtttgctgatttagatgcagatgtttctacaatggggacttccccgaacggattaaacattaatgacggcgtcggttcgactcatcccgaagcgctcagcgcgtttgtcaaagagaaaaacgcggatctcggccttgcattcgacggtgacggcgaccgcctgattgctgtcgatgaaaaaggaaatattgtagacggcgaccaaatcatgtacatatgctcaaaacacctgaaatcagagggccgtttaaaggatgatactttggtttcaaccgtgatgagcaacctcggcttctataaggcgctcgaaaaagaaggcatcaaaagcgtacagacagctgtcggcgaccgctacgtagtagaagcaatgaaaaaagacggctacaacgtcggcggagagcagtcaggacatcttattttccttgattacaacacgacaggggacggattattgtctgctattatgctgatgaacactttgaaagccacaggcaagccactgtcagagcttgcagctgaaatgcagaagttcccgcagctgttagtcaatgtgagagtgactgataaatataaagttgaagaaaatgaaaaagtaaaagcagttatttctgaagttgaaaaagaaatgaacggcgacggccggattttggtgcgcccttcaggaactgaaccgctcgtccgtgtcatggctgaagcgaagacgaaagagctgtgcgatgagtatgtcaatcgcattgttgaagtcgtccggtcagaaatgggattagagtaacgaagtctattatcagagagtgaacaagacaagcgaggtttacataagataattgtgagacatacggcaaagttgtttaaaaaacaattgaccgtttatgccacatgttgtaaaatcaagcttgtcttgttcttattttctcaataggaaaagaagacgggattattgctttacctataattatagcgcccgaactaagcgcccggaaaaaggcttagttgacgaggatggaggttatcgaattttcggcggatgcctcccggctgagtgtgcagatcacagccgtaaggatttcttcaaaccaagggggtgactccttgaacaaagagaaatcacatgatcttccaaaaaacatgtaggaggggacgattgaaagtccccttgaaatttgactttcttcgtctccttttacaatcttaggaggaagaaaaatatgtgtggaatcgtaggttatatcggtcagcttgatgcgaaggaaattttattaaaagggttagagaagcttgagtatcgcggttatgactctgctggtattgctgttgccaacgaacagggaatccatgtgttcaaagaaaaaggacgcattgcagatcttcgtgaagttgtggatgccaatgtagaggcgaaagccggaattgggcatactcgctgggctacacacggcgaaccaagctatctgaacgctcacccgcatcaaagcgcactgggccgctttacacttgttcataacggcgtgatcgagaactatgttcagctgaagcaagagtatttgcaagatgtagagctcaaaagtgacaccgatacagaagtagtcgttcaagtaatcgagcaattcgtcaatggaggacttgagacagaagaagcgttccgtaaaacacttacactgttaaaaggctcttatgcaattgctttattcgataacgacaacagagaaacgatttttgtagcgaaaaacaaaagccctctattagtaggtcttggagatacattcaacgtcgtagcatctgatgcaatggcgatgcttcaagtaaccaacgaatatgttgagctgatggataaagaaatggttatcgtcactgatgaccaagttgtcatcaaaaaccttgatggtgacgtgattacacgtgcgtcttatattgctgagcttgatgccagtgatatcgaaaaaggcacgtaccctcactacatgttgaaagaaacggatgagcagcctgttgttatgcgcaaaatcatccaaacgtatcaagatgaaaacggcaagctgtctgtgcctggtgatatcgctgccgctgtagcggaagcggaccgcatctatatcattggctgcggaacaagctaccatgcaggacttgtcggtaaacaatatattgaaatgtgggcaaacgtgccggttgaagtgcatgtagcgagtgaattctcctacaacatgccgcttctgtctaagaaaccgctcttcattttcctttctcaaagcggagaaacagcagacagccgcgcggttctcgttcaagtcaaagcactcggacacaaagccctgacaatcacaaacgtacctggatcaacgctttctcgtgaagctgactatacattgctgcttcatgcaggccctgagatcgctgttgcgtcaacgaaagcatacactgcacaaatcgcagttcttgcggttcttgcttctgtggctgctgacaaaaacggcatcgatatcggatttgacctcgtcaaagaactcggtatcgctgcaaacgcaatggaagctctatgcgaccagaaagacgaaatggaaatgatcgcccgtgaatacctgactgtatccagaaacgctttcttcatcggacgcggccttgactacttcgtatgtgtcgaaggcgcactgaagctgaaagagatttcttacatccaggcagaaggttttgccggcggtgagctaaagcacggaacgattgccttgatcgaacaaggaacaccagtattcgcactggcaactcaagagcacgtaaacctaagcatccgcggaaacgtcaaagaagttgccgctcgcggagcaaacacatgcatcatctcactgaaaggcctagacgatgcggatgacagattcgtactaccggaagtaaacccagcgcttgctccgttggtatctgttgttccattgcagctgatcgcttactatgctgcactgcatcgcggctgtgatgttgataaaccgcgtaaccttgcgaagagtgttactgtggagtaataaatgtttaacccctttggataagattgtctaaaggggtgtttttatgtccaaaagagaaagaacgtctacagtggaaaaatggattaaagaaggtgatgggacaggactcgactatctatcggccatggctatagatttaagatgtttccacattaggtcggtcaatcaggttaaaaggcattaagacttttgcctaactgagttttctaatgttaatacagatataagagagcagttcctcattatgaaacgcttttgatagcagttggaataaagcatgctagaaatccgaaaaccggagagcctattggaatgataacgtgtttttttattgtcaattaataaaggcaaaagaattctagaagtcgcacttacaatgtacttgtgggccttaggttttaaagctcattctttttttattgagtacattccggtttaagttgaaatgattcagtaaaggacacgccataaataaaaggtagcgtatgattgccattctttccatggaaccgatatttctaagatttcatctttcgtaggctttcgattcatattacgtaatatttttatcgaacgaattagacccacatcatcgattggaaaagctgtcgggaacctaaggcagcgcattagaacataattggctgtccaaggaccgattcctcgtattttaattaagtttttttcagcatctttaaagttcattttcattaatttttccctcgataattccccacttgccattaatctggctattccaatgatatattcacttttttttaccgtcattttaatatctgccaggtcggtaggggttaaccgtgcaattcgctcgtacggtgggaacacccaatactttttaccattccattcaatagaatcgccaaatgcttctacaaattgcttctttaaggagtacgcgaaggctaagttaatttgttgccctaaaactccccaacataaagcttcaaataaatcgggaatgccgatcactcgcaacccataaaattttcgggcaggcattttaagtaatggatctgcttttgccatttcataaaatggagttaaatcgttatcaagatcaaaccattcatgaatatattttacaatctcttcccgtttccactgctcaacaggtctagaatcgtttaggaattgaacaatcatttgtttattattgattacgcttacctgcactaaggaccgaatttccccaatggctataacttttgtaatgatattgttctctatttcatacatgcattcatttttttccctggttaggtagccaaggttcgcattcatgtcgaaaatttcaggtaatgtaatgacaataacatcattgacttcatgccatgtcactttttcattctccttatcttaaataattataagaaaactcacgctggttgaaattagtttatcacataataagctttactcattttgttatcttgctattacattctaaccaccttatttttttctatttatgaggttatagtgttagttatcaagaatgctaaacgggagtggattaaaatcgcccaagatataaaaacgtgtgtcgaaaacgtaaattgggattcaagtcaaaatgaattagatgagcattgtaaggaggggtgagataaatgccggatagtatcaataacggacataaagagagccatgatcagagaaccttaaatgatgtagaaatgctaacaaatgaaaagtggcatgcaattataaataatgatgcagcgtacaataatcaatttttctacgctgtaaaatcgacagggatattctgtaaaccatcctgtaaatctcgcgttccgaaaaaagaaaatgtatgtatttttccaaacgcagaacaagctctccacgcaaattttcgcccttgtaaacgttgcaagcccactaatgaaaaaatgcctgatagcgagtgggttgatctaattactgaatacattgataaaaatttcacagaaaaattaacgctagaatcgttagcagatatttgtcatgggagtccgtatcatatgcatcgaacatttaaaaagattaaaggcattacgctggttgagtatatacaacaagttagagtacacgcggctaaaaagtatttgattcagacaaataaagcgattggagatatcgctatatgtgtgggtatagctaacgcgccttattttattactttatttaaaaagaaaactggacagacaccagcacaatttcgtcaaatgagtaaaatggaggaaacgtacaatggaaacaaataaaccaaccctttattggtctttactaatgttcaagaattgggatttttatattgcttcaactttaaaggggcttgtgtttgtaggttcacagaacaaaccaatcgaggaattgttcgaatgggctaagaaacgctttccaggaagtcttcttgttgaagatgatgataagcttgaaccctatgctgttgaaatcactcaatatctagaaggaaagcggaaaaactttactgttccagttgagtacgccggtacgcaatttcagctagccgtctggaatgcactttgtgaaattccttatggacagacgaaatcctattccgacattgcaaatgatataaataaaccagcagctgttcgtgctgtaggtgcggctattggggctaatccggtattaattactgtaccgtgccatcgtgtaataggaaagaatggctcattaactggctatcggggcggatttgaaatgaagacactgctcctcgatctggaaaagcgagcttcatctgaaatggatgttcctcattgaaagtgaatcatctataatgggttggattcttttagaggaaagtaaagaccagtttactgataaacttgacaacttttaaaatttagcatatcttatacgtaacttaataatcgatgcagatgtttatttttccttttaaaatatgtaggcctttagcattcttttcatatttaattttaaatattgataggatgaaaaagtatcctaataaaaaaggaagagaacatgagtcgatttatttgataatcaggactatattaaaggaaatgaaaacatagcataaagtaaagaccaataataaggtagcacttcaaaaaacttcgctgaagttagttgaagtgaagccgacaattttcaggattcaatgatctaacataatcattgaaattttgaagttgtcggcttttttgttggaaaaaaatagagataaataaaaattgaaataaataatagacaaatatgatctgattgaaagatcttttgaccaataatgagttttaaaaaagggagaatttagaatgttagtttcgctgagtttgtcatcattattaacattattttttattatgcttatggcttctgggattagtggactattgtttttacatccgcgagtacccttgagttttgttcgcattcatattgggatcttggctttaccacttttggtttccttactgattcttgccgatagtggtgtgagcggaaatgttggcccttggcacttagattccttagcttgtttaatgactttctttgttcttgcaattggattcatcattcagcgtttttctgtacgttacttaatgggggatcgatcttatcgaaaatattttacgctttttactttcacaacaggagctgcttctatgacatggttaagtggtgatctccgcttgatggttctattttggggagcaactcttgttggtttaaccttacttataaggttaaacagtgcttggcaagtggctagtgaagcagccaaaatttctggccggttatttttgttaagttggttttctttgttttttgcgatgatgtggctttttcatgccacaggtcaatggcagttatcattggttgtaacaaatgaaagtttagctgggctgggagaatgggagagaacagggattcagctattgattgtactggcggtgatcattcctgcagctcaatggccgttccaaagatggttggttgagtctattgttgctcccacccctgtttctgcaattatgcatgcaggtttagtaaatgctggaggaataatactaactcgattttcacctctatttcatggtggtatcgcttcgattattttacttctgcttgctggcatttctgtattgattggaactggaattagtttagttcaggttgattataaacgccagttagtaggctccacgattggacaaatggggtttatgctcattcagtgtgcattaggcgcctatatagcagccattattcatcttattttacatggtttattcaaagctacgttgtttctacaagctggttcagcagtagggcgtcatgaagtatcggctcgcactaatgaaagaacatcctatttatggatcatggctggtcggattttatccttagttataggtgttgctttttggctcactgctcctggagacgggtatcacttaatcagtgcgctgatcttagggtggtcattgtccgtttcttggactcagcttgtcgcttttggagagggccgaattggccgaattgccggcttaactgttttaggaggagcagccctcgtatattttatcattcataaccttttctataagtggctgcatacaaccatttttcaaagtgttcaacctccaatgtcagctgtcatgattgtcgtatgtctcttactatttggcagtgctttaggtacgtgggttgctcgtcatcgttcttccgtttttttcgcggtactctatctttggttagttcgattaggtgaagcaaaaccaaagtcagtagagagtcacccagactaccttaaacaatatatttcataaggagctaatctgagatgggcattacatccgtattaacgaaagataatgtaaaaaagatagatacagatattgatgttcaagaaagggatcttaacgttttcattacatctgccagccgagtgattgcgccactttggcctatttctacatttgctgcacgtaatccgtggatgggacttgaaaaccaaccttttgatcaggttgcaagttggttgaaaaacactcgcgatgttgatatatatcctagtgcgtctatgatccgttcagcaaagaataaaggtgagattgatgaagattttgtggaaatggggctgcagcgttggcttgattcacattcctatcacatcccacgggacgtggcagagcgattttgtcatgctgcattaaagttagatcccctgccttccgaccttttatcatcacatgagctggagaaattagtaagtgaatgtagtggattggatcatatcgagaatgtgtttatgcaaccactaagttcgtatatagagaatcaagatggtgaaaggctagtcaatatactagatcatcatgtcattaagtggagtaaattatatcttgatgactctcaagcaggctggacaatgcctaatcgtgaggaaggtttttatcgtgcttggcagcatctcattcaatatgatccagcacttagtaaaaagcagcgagaaagggtaaaaggttggccgaaagaggcacatttggctttacaggaagctttattcgcactagaaatcccagagtcagaaatccagacttatcttgaaggtcatttactttcattacctggatgggcagggatgatgctttggcgctcccagcaatcgagccacgaacatgcactcctaacagaatatttagcggttcgaatatccatggagtgggctcttataaagccatacttacctttgactaatgaacgatctaagaaaaaaatttcaattgctccccttatagcagcttggattcattggggtgggcttacattagaagaatggtcacagatgacggccattgaacaaaacgaatatttatcatttgcctacagctttgatgagaaacttcgcaagaaactttggttagaagcttgggaacaaacgtacactgatcgattaagccagaagatcatctcgaaacaacgtgaaaccggcggtaaaaaatctgcattagctcaattagcattctgcatcgatgtacgatcagaaccttttcgtcgtcatctagaaaaagaaggcccgtttgaaacgattggtattgctggtttcttcggggtgccgattgcaacttgtgaacttggcagtaaacacagtcatgcttccttgccgatcatacaaaaaccgcaaaataaaataaaagagttcgcagatgaggatgtattcaaaaaatacaatcaacggaagcaagcaattcattctttaagccatacctttaaaacgatgaagcagaatgcgctttcgagcttactactgcctgagctaagtggaccttggcttactctgcaaatggtagcccgtagctttgtgccaagaaaggcgggtcgtttcattcgtaatctccgtgaggcttggttgcgcaaacctgatacaaaactctcgcttcatcatgatactacagaggcagaaatacctgtgggttttactgatgaagaaaaagtgaactatgctcgccaagcattaaaaatgatggggttaacagaaaacatcgcacccttggtcgtgatctgcgggcatggcagtcaaagcactaataatccttattccgcagcccttgattgtggtgcctgcggtggagcggccggtggattcaatgctagagttttagctgctttatgtaatctatcagaggtacgagaagctcttttagctgaaggaattcaaattcctgaggatacggtttttgcagcagctgaacataatacaacagtagatgaattacattggctttatgtaccagagctttccgaagctgcacaagaagcatttgaacaaattgaagccgtgatgccgaaagtgagacatcatgtaaacgcagaacgtctagcccaattaccgaatttccaatcgaagctaaaaaatccgaaggctgaggcaaaccgatttgcggaagattggagtgagatacgtccggaatggggactggctcgtaatgccgcttttattatcggtaaacgtgaactaactcaggattgtgatttggaaggcagagcctttctccataattatgattggaagcaggatgaaagcggtgaactcctagcaaatattattgcaggacctggaactgtagcccaatggattaatttacaatattacgcatcaacggtagcacctcattattatggcagcggaaataaagcaactcaaaccgttactgcaggtctcggcgttatgcaggggaatgcaagcgatttgttagccggactgccttggcaatccgtcatggaatcagatcacgaggcctatcattctcctcttcgtttattgatactcatccaagcacctagagaatatgtagaacggttattaaataatgattcagcatttctgcaaaaagttcaaaatggatgggtccgactggctagtcttgatccagaaggatgttgggaaagctggtaatgatgaatctaagcatttatcaaatggatttgttattcaaaataaaaatgataaacataaggaagaggtgtgctgtatgaatgtaaaccaaaataaaaaagtattatttttgacggatattgaaaacggtttggagcctattttacaagaagcgactaacacttctgcagagaatatgttgactatacaaagctatggtgccggtatttcacatccttatggagaaatcatgaggtctgttatttttgcgatttaccaggaagatgttgaggagatttttgtagtaggaacaaaagataagaagacttccgcaggtaatggactaactcaacttgaaacaatgaaagataaaatacaaacattggattatctttttcaaaattgcaagcctgaatttttaggtggtacggtcgatgaatggctaaatgaaaatagcagtgacaccattgaaaaaagtgttgatatgattcgacatcatcccctagtgccgtcatatgttaaagttagaggtttattcgttcatcataaggatggaaaaccctcaatcgcggagggtcctgatgctaaaacaggtcaagccatacctgatcattgcttgtcacgatgaaatacaggttcaacttctaaacgcacccatatatggagaaagcagttctaaggagattgtatgagcgctaatttaactgattttgtcacgaaaacaatagaggacatgaactcgtttgatcgtgaaaatatggaatttatgaaaaaactaattagaaaagcaattgatttttatcatctaaagtcttatgaagaagttgaggaaacccattcaggaaatgttcgatttttgcatgtccactctatgatggaagaaaatatgttatccaaaatgatagtggtcacaagaaacggtaaaactgatttggatattgaaggtgtatatgaaggatatgttgtaagagaatattaatgagacgaaatcacaaatagaatatgccaatttttttgctcaggagatgtattagatatgaaaaagtctaagggttctattgaatcagagatcagtaagtccattactcaatgggagaaggattatcttgggcgggggtctgtatctgttaagactgatatactgcgggacatgatcatcgtcaatttaaaagggattttaacaccagccgaatatgtagtttgtggatcaaaagagggtatgttatctatcaaacaaactcgttcggagttagttgaatcaggtatagaaggccttaaggatattatcttaaaaataaccggagaaaaagtgaaaagttttcatactgatttaagctcccggacaggtgaacgagtgatggtatttaaattatgtaatgatctagagaaaaatttggaaaagatcttataatctaaagaaaataaatgttaagacggtatggaatttgttgtgaattgaacataaagaactgccgattcttttgttttacaattatggtatcattgataacttttattcatatcctaagcggacataaagagatatcaattcatagtacactgttgtgttattcctgtcgaaagatctaacatccgctgttgttatgagcggatgtttttttacatctattttaaatacatgaatttgatgctggtgattagtcacttgaacaatatttgaaaacatccttgtcacctgccgggtttccccaagtgtttagtgacatgattatgagaccaatttcgtaaagcttgctgataaatttaagcggtgaacaaaattgatatgctgtcttcagtttcatttcacggaattagtcagagataaacctttaattaaatatatccaaaaaacggattgacatatcgaaatataacgatataataatcgatatggaaccaattgaagtattcaaagccttatcaaatgaatcaaggctgcaaattttgcaatggctgaaggaaccggatcgtcattttgcaccccatgaagggattgatatgaacacaatcggggtatgtgtcagtcaaataacagacaaattgaaaatgacgcaatcgacggcttcccaatatcttaccatccttttaagagccggcctaattaaggcggagcgtattggaaagtacacatattacaaaagagatgaagaagccattgggaaacttgctgactttcttaaaacagagatataaaaataaacatcaaaagatgtttatttttacaccatacatatcgacatattacgatgtgtttattttttataataacatatcgataattcgtgatatgtttattaataattaaggagtgaatgttttatgtctaacacttggaaaatttatattttagccattgtcagctttttagttggaacctcagagtacatcatttccggaattttggatcaaattgctcatactctcgggatcactttagctgccgcgggccagtttattaccattttttcacttgtatatgctctttctacacccgtacttatggcgttgacagcaagtatggatagacgcaaattgatgatgtatgccctaggtttgtttgtgttcggtaatgtcctggcttttgtattgcctggttatggatggtttattgcagcgcggatcattatggcgatgggagcaggtgtggtggttgtcaccgcattaacgattgccgctaagattgcatcggaagggaagcagggaagtgccatcgctacggtcgtgatgggatttaccgcttctttaatcattggtgttccgcttggaagaatgatagcagtagcattaggctggaagtctgtatttggagccattgctttgttgggattgatcgcaatggtcgttattttctttactcttccgcatactgaaggggataagcctgtgcctttgcttcaacagcttgctcttttcaaaaaacggaaagtggctatgggattatcaatcactttcttctggctcgggggatattctgttgcttacacttatttgtcaccgtatctcttgaacatctcaggtataaacggcaacttgcttagcggtgttttgcttatatttggaattgccagtttggttggatcaaagtttgggggatatagcaccgataaatggggagtgccctttacactcgttggcgggatgacgttgcatatcgtcacactgattcttctgtcacttgtcactcattcctatatcggagtgttggtgattctcatattatggtcgtttgccgcatggtccaccggtccgacacagcaatttcacctggctacaatagaaccggaaatgtcaggtgttttgcttagcatgaatcagtcaatgatgcaattcgccatggcggtcggcgcaggtataggaggggtttttgtggaaaacgtatcattggcctcgattacctgggttggtgcgttaggggttatgattgccattattgcatcattgctgattttcaattcgcaaccgaaacaagcgctaaaagatatcaatcaataatttcgaaagatctaacatccgctcgttatacaagcgggtgtttttttataggctcaagtagaaggcacactgaagctgaaagggatttttgccgacggagagcagaagcacagcaagttataatatactaggaagggaaataacggtatggcagaagggttctagcgcttctcgcctgtaagatcattactttgaggatgtgtcatcgtgaatcaaaagacgtacattgaaatgagcaggacatcgcagtacatcaacaaaatgagagagtattcagtgctaattgatggggctgagatgggaactatcaaagatggaggaaggctgcgaattgatttaccgcctggtgagcatgttattcaagtgaagattgcttggtgtacaagcccaactttgaggtttactttagcggaaggagaagtgttgaagtttagatgcggaagtccgcttcgaggttggaagttgcttttggcacttttttctgttttgggccgtcctgaaaattatctgtttatcgagcaggaagaagagaaaaaagctttgtggtgactgtatgttactacatggataaatatcgctgaattctgttttgtgaaagtttaattgacataagaaagaatggcagccttctcaatatcgtgctccttagagcaggctgtcaataaggaattctcggttgtcaattttcataaattcattgagaaactaaatactccttaatcaattgccacctgtcacgagcatgcatgatgaactccgatgcaatggctacaaccaggtttttctccggaacacagcaaatcacattcccgccatcgcctagtgctgagtatgagaaaacgccgtcctcatcactcagccaccatagataaccgtagttattggggtttatctctgttgattcgtcaatccatgatctccgaatgatctgttgattgttccaagtaccatggttcaaatatagataaccaaaccgagccatatcccgtggagtcagcgtaagtccccatcctccggttgagttgccgtccgggtacctctcacatgtttaccgaatagatcgtcaaagctgaatgatttcatttcataatgcggaatttctttcatgccgatcggtttaaataagtactcgttggcaaattcgcgggcgcttttgcctgtggtgcgggtgatgatggctgacagcaggtgtacgcctgcggtggagtatttaaatgtgccgatttttcctccttgacccagcataccgagcgtataggcgatccaatctggctgcatgcacatcttatcgagcggttcttgccagtcttcaaatggatagggagctgtcattgtgagaaagtggtgtcttgtttttgtttattaggagtattcgacacattctgggaaagaagcagtgttttccgaataaatccagctccaagaaaccaaatctaataaatggatctataaaaacgttaaaatcaaaagaactaatatatataggctaacgaaagagatatatcattttttgaaaaatagttttgattgcttatagttgacgagtattaagtgaaaacaatccaaaaaagtccctaacctaaattttaaatattaataattagatgcggttagagaaaaataagttaaatatttgaaaaaaatgttgaaaaaagacatataaaatgatattattacctatataagtaattaatttcttaaggaggaacgaaaatgaagaaaaaaattgctgcatttctactattaacaatagtagcgataagcacgataattcctgtcacagtatctgctggaagcggggaaaagtggaactatggttatgacaaaaagaaaatgcaggattacaatgattactaccattggctttatcgtcacaattcgtcaataacaaaaaaaggtataaattatccaggtcgtattgcccaacctaaatattggtccaaattaagactcgattataccggtccttataaagtttcctaccacaaacacgtttacaaatagaaaatttttcaaaagggatttatattataaaatataagtcccttttgcattaagataaataaggagaaaatatgattgaaataaaaaatatgaacaaatcattcaatgaaagaaaaatttttgaaaacttaaatttggttattgaacctggggagtttattggaattattggaaagagtggaaagggaaaaactacactgctaaatataattggcacgttagaaaaagcagatagtggttctgtaaaaatattagatagggatataaatagaaaaagaaataaaagatatttacttagacatcacttaggatttatatttcaaaactatgcattaattgataatgcatctgtgaatgagaatctagaaatcgcacttaaacataagaagatgaatagacaacaaaaaagaactgctatgtcttctgcattaaaagaagttggtttagataactatggtaaagaaaaagttcatactttaagtggtggggaacaacaacgcgttgccattgcaaggctgctgcttaaaaatcctactttgattttagctgatgaacctacgggatcattggatactgaaaacagagatattataatatctctttttcaaaaactacataaacaagagaagacaatcattatggtaactcacgataaagaactaataaaaattttttcaagaactctacaattataaagggggaatagattgtgaaaaaattattattccttctcgttattactacctttatagttgtaagtttcctatcgataaagcaatttgaatatttacagtttcaatcttttaatcataataatgttcatgattcatggaatgttgttatagatgaagggaattctaaaatcggtaaaaaagataattttaaaatgttggaacaaatagcatttgaatctaaagttaatttgcaacgcatatcatatgaaaatgataataataaagataaagtagtgtattatgttgttctctataatgcaccagaatattttaaagatctaaaactaagatatggggaatttttgcaaagtaatagtagttctaatgattttctatctactgttcaaacaaagaataagcatcagataggaacattagagatatttcatagttttgaacctattgaaattaggccaatgattgctgcggaaaaaacaaaagatattaaaggtacctatactgtaataggtgaaaaacatgctgaaaattttaagaaaatcgcattacagcatggtttttcaattaagttatccaaaaatgaagattcacaaagtgtgagtacaccatatccttatcaggaaatgatgtatataagctcattgattttatgcttattaataatgcttacaatattatatgatgtaagtaataactataaagaaattgctgttaggtatatgttgggatgtaatttatttcatataggaatatatctattcagaaaatatattcctatcattataagttccttgcttgttggaagtttaggtttaatattatatttatattggtataatcactatcaacaattcattgagttcgtatattttttatcgaaaaacattgctctgttatcaataatacttacaatcatttttttaataatatggtttagtactggaagtatcaatatcccacaaatgattaaaaataaaaaaccagtaagaatgtttttttatttaaatattattgtgcgctttgtactggcagtttttctattgttaggtttagagcaggggattagcaaatttcaggtgttaaaaagtacggtttcgaatcaagaaaaatggtctttgttaaaacaatattcttatttagggatgatagcttcaccagagcaaaaacaagaaactcttaattttcaaaaagataaagaagagcgaaaaaaaattcaacttttctataaaaaactagaatcccaaggggcgttttttatatatccttcggacttttactcgaatgattcacaaattacatctcaagacataaatccatggggagaagagggaagaaaagtagaaataaataagaattatttatcggttaatatgataaaagatatacatggaaaagatgtggggataccttcctctaataaagatgtaataaatgtgttagtaccaataaaatttaaaatgtataaagaagatattgaaagatcattagcagaagattataaaggtatatacgatataaaacgcgctgctcctgtaaaaataaatattatctatgtccagaataaccaatcttattttacgttttctacaaattcagctcaaaacagtaactataagattgtagatccgattgccgtaatagttaataataaatttgaccctttgatactagctaataatatttctatggggtatggtttttataccaaaattagtgaaggtaaagatcctttcaaaataataaaaagaacattagaggaatatgaattaaacaacatatggagccctgtatctattgcttattcaaatgtcgaattaaaaatagccaatgataaagaagcattacagttaacggctatatattgtggggtatttcttttgttagctgtagtattattaattttttcggcagtttattacttagaaatgaacaaaaagctattatcaatacaatggatatttggttatagcttttttgagaagcattgtttggtctatctctcggtgttggttttctggagtctgacttttatggttagcttttatgtatctggaaatattgcgttattgggtgaaatttccttatggttggcgattttagacatattattaacaagtatattattgattatgagagaatataatgttactaaacaagtcttaattaaagagtgattagtacaaataattgggggtaaacatttttgaaaagaaaaataaaatttcttacgatttgtttagcgtttgcattattatgtctaattatagctgcctattctatctcaacgaataaaccggatgatgaaaataatattaacaaaaatcaagttggaaaaacacaaaaacaagatagttcatattcagataatatggtatctgatcaagataataaatactatgtcatctatataaaacagaagaatggaacaggctcatcatttgtgcctgaaaagcttaatcctggtttcaaaaatgactctgatgattttaacgtaagtatttcctttgatgataaagggaacgtaattaataatgataaggtaattgaagtggaagacttctcactatcaaatactaataagaaaaaaattagaaaaatagttggtacaaataaatatgatgcagctttgaaagaagttgaagatcgagtgttagagactaagaaagaattagaagaaaattccaataattagtaaatatacaattagcagtattgaccgctgtaaataagaggcggtctttttgcttagaattaaatatttactaggtttaatagaaatttattttcatatcgtatccttttcgtattacgtgaaaggagcactatgaaagttgtactgactatagtttaccttctagacggagaataaaaaagagccggataaccggctcggtataagttaaaactgctttgttacgtcgtattcataatctatttttgcttttacgttgctcatcgtcgatctggctgtcgctaatgtattatatttaaaactccatacctttgccacactgagttgatctgacaaagagatatcataagaccctgaagtcgagctgtttacaagagcacggcgccattcgttgttttcgctcgtcatgatcaggtggcgtgtatttccctggcttggtgtttgagtggcggttgtctgaactctggttacaatggcatcacgcggtatcccagattggtttgttaaatcaaccttgatcacgctggagtcagaacctgaggggctaaggcttgtatttcctttattttcagcaatgccgctgaattggaatgttccgctgcctgatttgattcggtcttcaattgaaagtgtaaaatacatgtttccggtataggtgcctcgtgacactttcacataaaaggtatccgtcgtgttttgggcgtctgcatttgcataaataaaagaagaaaacgtattagggttaatgacttctgtcccttgagaaacaggtattctattcttatcataaatttcaattttcatccctgtatacgcgctctggtatgtactcctcacgtatactttttctcccttattagccgtaaaagtgaaataggcttcatcttgaccagcttccagtattgttgtatcgatatttttatatttccaataaccgatcggcattgcggtatcaaatgaattgtttcctgtgatagcagtgactccgacagctgatgccgaatacgtaaaggtgaataagacagacagcataacagcgaatggaataagccattttttcaccatgcaaacaacctccttttatttccatcatacataataacgatttaggtgtaaataaatgttttttgaggttaatatatacattatctttgccgataaaaaagaataagagagaatactcgggagggaattcaatgcgtctgaatcggcaatttatccgcactcagctgatggcacagaacatattgagcaagaatgcgcctgccaaacgggagaatgcgactgaaaatccagcggcagttctggaaaaggcatacagcaggcttaagtcacaatcttcaactgggggaatcaatcagttcaattattctaaaaccagcgtgtcgggaaacagcggggcgttcagcaaagtgtatcaatcagcgaatgatcgaacagtgacagacacaggggaagaaacagtgattcaatcccaaaacccctatgaatctgagagtgatatcagaatcaaaatactagatgaaaaatacagcaggatgaatgcgattaataaaacaaagtctgatccattaggctatattaaggataagtaccaaaattcaaagtctccttatttcagaagtgatctgtcagctgcagaaagacaggccgcttacgataatgaaacagaatggttattcaaagggaaggcgcaaaactataaccttcaggatgctgtgtttcggaatgtcacatttcatggggaagtggaagctgagaatgaaaaggtgtatcagcggggacaggttaaccagcagctgcaagtactgttgaatcgaaaccatattcatattccagaggggacagagctgacgtttacaatcacaccgattgactatcaggtgcgggtaagcgggacagacgatcaggatctgatcaagcaaattgagcaagtgctgcaatctggagacaacagcaaagaactatttttgcacatcatgaaaagccaaagcagtgattcagcacaattttccgaagaggcctatcaaaagtatcaggctgctcgtgagatgtatgaagttacaggctaccatttgaaggatttagaagtgattgatgggcggtacgtcacgcctgagggacgtgacttaatggatgtatataaggaagagcttgaaaaagatccagtgcagaaacaaacggcttcttatgctatatcttactatcgttcagagctcagtaaaatcgcggaagccgggtataatgccattccggatttcatcctatcaattgattacagcaatggatctctgagagatgtgggacaaagcaagagctatgggaccggagataccgggtggcttgaagcattaaagcgtcaaacgggtgtgaattattaggtaagctgttcatgtaggacagcttattttttatgagaatctaaggggtgaattaatcccaatattcaaataattttattatttttatataaaagattttaaaagaagtgaacgattcaaaactctgaacaaaggtgtttgcctgaaaaaaacaattgtattttccagagaaatttattatgatgaaataagtaatttaggagattatataacaattttaagtttgaattttctgattgttatcactgattcatgtgaaggcaagcaggtctgctgttttctcatttatgagtattttgttaggaggaggaagaggagtggcaaataaagaattaaagaggggcctgggcgcgcgccatattcagatgatcgccttgggcggtacaatcggtgttggcttgtttatgggttctgccagcacgatttcatggactggcccatctgtccttctggcttatgcaatatgcggaatttttatcttttttattatgcgtgcgatgggtgaaatgctgtatgtcgagccgagcacaggttcttttgcgacgttcggccatcaatatattcatccgatggcaggttatataacagcatggagcaactggttccagtggattatcgtcggcatgtcagaaattatcgctgtcggttcttatatgaagtattggttcccggatttgcctgcttggatacctggtatcgtggcaatggtgattcttggtgcggcgaatttaatttctgttaagtcgtttggcgaatttgagttttggtttgcgatgattaaaatcgtgacgattatcttgatgattattgcgggaatcggaattattttcttcggttttggcaatggcggagatgcgatcggtttgtcgaacctgtggtctcacgggggcttctttgcaggaggtttctcaggtttcttctttgcactgtctcttgtcattgcagcctatcaaggagttgagctgatcgggattacagcgggtgaagcgaaggacccgcaaaacacgctaagaaatgcgattcaaagtattatctggcgtattttgattttctacattggcgctatttttgtgatcgtgacggtgtatccttgggatgagctcaactcactcggaagtccgtttgtgtctacgttctcgaaaattggaattacggcagcggccggcattattaactttgtcgtgattactgcggcaatgtccggctgtaacagcggtattttcagcgcgggccgcatgctgtatacactgggtgtcaatggacaagcaccgaaattctttaagaagatttcacgcaatggtgtgccgctgtatggcacaattgcggtgctgatcggtttggctgtcggcgttgtactgaactatatcgcgccgccgaagatctttgtctatgtatacagcgcaagcgtgctcccagggatgattccttggtttatcattttgatcagccatatcggattcagaaaagcgaagggtgctgcattagataaacatccattcaaaatgccgtttgctccttttacaaactatttgacgattgctttcttgctgatggttctggttggcatgtggtttaacgatgatactcgtatctccctgattgtaggcgtgattttcttagcgcttgtggtcattagttattatgtgtttgggattggcaaacgcacgcaggccaatttgacaaaaagcgaacaagcagctgaataacgataaaaaagagacattcacggatgtctctttttttatttttcgcgtatggattttccctattttagcaagctatagggtaaagatagcagaaggaaaggtgttcataaaatggatgttacactcggttatttgcgcgaatcactttcgaatcatctagaaaatgaagtctgccagcgtatttgcaagaagatgctggcgaagcgttatgcaaatgaaggggaatttgtaaaagacttagatgataatgaaatgtcttttttgaaccatgtattagaaaaagaaattaagtatgcccagaatgaacaggatcaaaaacgggccaaggaattaaacgaggtgtatgaattactgctttgagaaaggcgggtaagaaatgggagcaattgaacgaagcggatatacatttcagccggagtttagcgttgtccgtcaaaacggagccatccatgtgtaccatcaaggagagtttgtggaagaaatcgaatttgaatttaacggggaatatcccgatcatgatttgattgaagagcttgtgaatcattattgttttgagcatgaaatttagagccctgccgtgcagggctcttttatttaggatgtgatcaggccatactttttcaggatatccacggtgatgtttttggcttttgtgccggaatcatcgacattggtgacaaagacataagagccatgctctgttttgatgaatccgacaaaccatcctaatcccatatctgtcaggcgagttccggttttcccgtagagcgtgtaatgatcgccttcctcttgaatcatcatgcgcttgacggttttcattaccggcttgtcaaatggaagctccttgttagccagtttctccaaaaaagtttcttgttccagcggagatattgtgagcgagctttgcagccaaaactggtcgattcccccgctgatatcctcgttgccgtaagatagtgtatgaagccatgttttcattctttcctcgccgatatctctcgctaatgcctgataataccagattgcggattcgcgcatggccgagccaagcgtatggtcgcggttccatgattcgaattcacgcttgaccccgtcccatcgttttacatcgtattcatctcttacagctttgacctgcaagccgattaaagcgttcacgactttaaaggtggattgcggagtttgtctttgatttgcccgttttctgttatagacaaatgtctgatccttttgtaaatcgtgaagaatgaaggttccatccgtatccttgaattcgtcatcgacattcattctgctgacattcaagtgtttttcatgagcagatgatgctgcgtggacggagaagccgccgatccctgcaatactcagcacaagcacaatatatatccattttttcattttgttctcccctttgttttgattaactaccttttctctctttcgtttgttcttcctttaaaaaataatcaaaaagcgcttaaatttggttttgtaaacaaatactgttactgggtttatagtcggaagataacgtgaaaatagagggtaaaaaggaaggcagggtaagcggatgaatgagcagattccacatgacaaaagtctcgataacagtctgacactgctgaaggaagggtatttatttattaaaaacagaacagagcgctacaattcagatctgtttcaggcccgtttgttgggaaaaaactttatttgcatgactggcgctgaggcggcgaaggtgttttatgatacggatcgattccagcggcagaacgctttgcctaagcgggtgcagaaatcgctgtttggtgttaatgcgattcagggaatggatggcagcgcgcatatccatcggaagatgctttttctgtcattgatgacaccgccgcatcaaaaacgtttggctgagttgatgacagaggagtggaaagcagcagtcacaagatggcagaaggcagatgaggttgtgttatttgaagaagcaaaagaaatcctgtgccgggtagcgtgctattgggcaggtgttccgttgaaggaaacggaagtcaaagagagagcggatgacttcattgacatggtcgacgcgttcggtgctgtgggaccgcggcattggaagggaagaagagcaaggccgcgtgcggaagagtggattgaagtcatgattgaagatgctcgtgccggcttgctgaaaacgactcccggaacagcgctgcatgaaatggcttttcacacacaagaagatggaagccagctggattcccgcatggcagccattgagctgattaatgtactgcggcctattgtcgccatttcttactttctggtgttttcagctttggcgcttcatgagcatccgaagtataaggaatggctgcggtctggaaacagccgggaaagagaaatgtttgtgcaggaggtccgcagatattatccgttcggcccgtttttaggggcgcttgtcaaaaaagattttgtatggaataactgtgagtttaaaaagggcacatcggtgctgcttgatttatatggaacgaaccacgaccctcgtctatgggatcatcccgatgaattccggccggaacgatttgcggagcgggaagaaaatccgtttgatatgattcctcaaggcggggggcacgccgagaaaggccaccgctgtccaggggaaggcattacaattgaagtcatgaaagcgagcctggatttcctcgtccatcagattgaatacgatgttccggaacaatcactgcattacagtctcgccagaatgccgtcattgcctgaaagcggcttcgtaatgagcggaatcagacgaaaaagttaaattaaaaagctctcttcctttatcgaagagagctttttgattacttctttttttcatcgtagtattggacgggatacatggagccttctgataccattttgttgtcctcgatatcttgcgggtccgggtggccggctttatcaactgggaacgtttccatgtctggctgttttgttattttcatcttcatgctgtgaatgaattctcttgccttttggcgatttgacgggtcttttaatagataagaagtgatgccgacagttgaaacagcgagacctgaaagtaacagcttttgtttcatggtgatactcctttctattttaagaatagtgtttcctgtatcattcccgttttggaaatagctaaacctattgtgtttttatcgtttggattaacagtaaattccatttaagaagaaactagtgacttcattcctgtattggaaggtaatatacattgacttattatcgtttcagtcaaaattcgataaatattgacaaagtaaagtaatcagaataataatataattagtaagagaatgtcatcatacatgaaaggtgtttacgatatgaatcaattgcatcgaagaatgggaacgttttccctcatgatggtcgggctcgggtcgatgatcggttcaggctggctgttcggggcttggcgtgcggctcaaatagcaggaccagctgctattatttcatgggttattggaatggtcgtcattttatttattgctctttcttatagtgaactaggttctatgttccctgaagcggggggaatggtaaaatatacgcaatattcacacggttcgtttatcggttttattgcgggttgggccaactggattgcgattgtgtccgtcattccggttgaagcggtggcctccgttcaatatatgagttcttggccatgggaatgggcgaaatggacaagcggtttggtgaagaatggaacgctgactggggaaggactagcgtttgcctctgtattgcttctcatttattttctgctgaactattggacagtcaatctattttcgaaagcgaattcattaattacgatttttaaaattattattccgggtcttacgattggagctttgctgtttgtcggattccacggagaaaactttactggcggtcaaagcattgcgccgaatggctgggcaagtgtgctgacggcggttgccacttccggtatcgtttttgcgtttaacggtttccaaagcccgattaatatggcgggtgaagcaaaaaatccggggaaatcaattccgattgcggttgtcggctctcttttcgttgcgacagtgatttatgtcctgctgcagatcgccttcatcggagcggtgaatccttctgatattgctcacggctggagccatttgaattttaattctccttttgctgatctggcgattgcgctgaatattaactggctagttattgtgttatatgcggatgcatttgtatcaccgtctggaacagggattacgtatacggcgacaacgtcccgaatgatttacggaatggaaaaaaacaaatacatgccgagtatattcgggaagcttcatccgatttacggcgttccgcgacaagcaatgttctttaacttgattgtgtcgttcatctttttgttcctgttcagagggtggggcgtattagcggaaattatttccgttgctacgttaatttcttatatcaccggcccgatcacagttatgacattgagacggacggggaaagacctgtacaggcctcttcgtttaaaaggcttaaacgtgattgcgccgcttggatttatctttgcgtcactggtgctgtattgggcgcgctggccgttaacagggcaggttctgtttattatcctgatcggtcttccgatttatttctattatcaggcgaaggcgaaatggaaagggtttggccggaactttaaagccggcgtctggatggtgttttatctgctggccatgatggtcatttcttatttgggcagtgataaattcggcggcctgaatgtcattcattatggctgggatatggttctgattgcgatggtatcacttgtattctatgtgtgggcgctgaagagcggctaccagacagaatacttaaaggatgcgaaagagataaattctcagctgcttaatggacagtcagaagctgctgccggaaaagaataaaataaataagaaaaccttgcgatagttgtcgcaaggttttttgcttttaataacccttttttactttgtggaaaagatcaggatagttggtgaacactcctgttacgccccaatcaagcaggcgatgcatatcagcttcattattgactgtgtaaggatgaagcaggaggccgtggctgcggatcatacggacgttttcttgatttaaagctttataatccgggcccgcaccgacagcgtatgttttgatttcttccagggcagcatctgtcattgacgccatttgtttggcttccagcaattgaacggtcggcaggtttggctgtaattgatggatttttaccaggctttctttgctgaacgattgaatgatcacctggcctggcttagaatgcttccccagtaatttatgtttctgcaaagaagcgatcagtttttcttccatacctgggtaggtgtcaggcgattttgtttcaatatagtagttcgcgtgctttccgaaacggtctaatacctcttctaatgtaggaactttaaggccgacgtactgcggctttgctttttccggataggcttcattaaaccaagaaccggcgtcaagcttcttaatgtctgcgagcgtatggtctttcacccagcccgttccggttgtggtgcggtccagtttttcgtcatgcatgacaatcaatttcccgtcttttgtcatttgcagatccaattcaatataatcagccttcattttctgagcggtttcgtaagacagaatcgtgtgctcaggcacatatccagaagcccctctgtgcgcgacggtcaggatacggtcaggtgacagcaggtttccttttgacgctgccgacactggcgttaccataaatgagagtaagcccagcgacagaacaaacaaggccagtattctattttttctcatgatttctcctccttatagataagcactacctgtctttcatattaaaaaacggatgtaaacggcgtgttggaaaactattaatcttttatgtgtctttcttaaacatgctctgcccgttttcctgtattccacgtcaaagccaagaagacgatggcaagaatacaggatgagatcagcatgataaagccgccgttccagttaaaacggtccacgacaaagcccataatggcgtttgcgaaggcggatccgccgatgtatccgaaaaatccggtcaaaccggctgcagttccggctgcttttttcggtgctagatcgatcgcttgcaggccgatcagcataacaggtccgtagattaagaagccaatgctgatcagggcgatattgtctacgagcggattgccggccggattcagccagtacaccaatacggcaatgaaaacacccgccataaacaaaacgcctgccggtgcccggcggcttttgaagaatcggtcactgatccagccgcacaagatcgttcccggtatgcctgcgtattcgtaaagaaaatacgaccagcgtgagtcttcaggagaaaagcctttggcttctgttaagtaagtaggcgcccagtcaaccacgccgtatcgcacgaaataaacaaatacattggcaaaagcgatgtaccaaagaaatttgttgttcagcacatattgaaaaagaatttcttttgttgttaattctttttcctgatttttaaaagcgtgttttggatagtcattccgatactcttcaattggcgggagtccgcaggattgaggcgtatcacgaaccaataaaacaattaaaaatgaaatgataatggcgatgatggcagggaagaaaaacacgcttttccaagtgacgaacatcgcgatcccaagagtcacaagcggagcaagaataccgccccctatgttatgggcgacattccagatcgacatttttgtgccgcgttcacttatggagaaccaatgggccatcgtcctgccgcatggcggccagcccattccttgaaaccatccgttgataaacataaaaataaacatgatggtgacgctcgaagtcacccaaggcattgaaacgaatagaatattaacgattgctgataaaaataggcctgtcgccagaaaatatctcggattacagcggtcagacaccattcccatgatgaatttgctgaagccgtacgcaatggacacagcggccagcaccaaacccagttctgttttcgaaaatccctgttcctgcagataaggaatggcaaaggcaaagtttttccgcagcaggtagtagcctgcgtagccaatgaaaataccaatgaatacttgcagtctgagccgtttgtatgccgcatccatctttgaatcatccagtctctcaatatgaggagccggtttaaatatattaagcattaaaattatccccctttgctgtttgtgctggatgtgtggcgtgcctcctttcccgaaaaacaaaaagagccagaaaacaccccttgtcaaaaggggttggattcctggctctcctcatctccatccaagctattaacttatcatgatagcgctttcttaaattatcatagtccggagcgaatgtaaacgggtaattttcaaattgggccttagggaagtaaatattatccttttactaaatgcagttatgtttttttactagtaacataaaaatctggagggaggctgtttaaaggtggatgaattagatatcgcattctttattttaccgttaggaattatgctgctatcgattgtcgggacctgtatttgtaaaaatccgtatctgatgccaatgcttagtttggtgatttctcttgtgctcacctttaccatttttattgaatcatttttgggatgggctgttgtctatagcttggtttctctggctttatcctatatcacattgattgtggtaaggaaaaggaaggaatcaggaaattaaaaagacctcactttctaacatatcgttgactaaggcaactatatgtgattataattggcttagtcaacaatattagaaagtggggattgatttgaaaacaagagaatcatctgtcggattaaaattcagaaagttcaatcgattttatacaaacgtccttggtttccttaatgagcacatttacgacagcccgttttccttaacagaaacacggattttatttgagatttataatacgcctaattgtacggcaaaagctcttcaggataagctggggcttgaccggggatatgtcagcaggattgtgaagcagtttgaaaaagaagatttgatctataaacagaggagcaaagatgacgcccgccaccattatatttttgtcacagaaacaggaaaaacgatttataaaaagctggaggagaaagccaacgaacaagtagaactgatgctgaatgaaatcaaccaaaaggagcagcacaagcttgccgaggcgatggcagagattgaagcgatcctttcacagtcgctttctgccagatcatcagagatatcgattagagattattttctctcggaggatcttcaactccttattgagaaacaaagacaattttacgcggaggctcacggttgggatgacacgtttttagcttatcttcaggagacatttgacgctgaaatcgaaaaaatatggattgcggaaagcggcgggaaatttgccggctctgtcgggttggtcaagcatgatgaaaagacagttcagctcagatggtttctggttgattcggattttcggggcagggggctcggcacgcaattgctggagcatctggttgcatactgccaagacatgaagtttgaccgcattttcctttggacggtgagtaccatggctgaggctcgtccgctctatgaaaaatttggattcaagataagtgaagtgaaacaagaagcgccattatggggacagcagctgacagaagaacggtgggatttggagctgtcatgaaaagactgcattatgcttgggtcatcgtctccgtcaccttcttgatcttattggcggttcagggggtgcggctgtcatttggtgcgtttgtggagccgtgggaacggcagttttcaatggatagaagcaccatctcgctgatttcgacgatgagttttattgtttatggcatatcacagcctgtgattgggcggcttgtggacaaatggggtgctcgggctgttttggcatggagtgcgttactgacaggagtcagcattttcttaacataccttgtgacttcgccttgggagctgtttttgctttacgggctgggtgtctcgcttggagttggcggagcatcgaatgtggcggcaagtgtattggtcgtcaattggttcagcaaaaatcggggactagcctttgggatcatggaagcaggctttggcgcggggcaaatgcttctcgttcccggctcactcatgttgatccattggtttagctggaagctgacggttgtggtgttgggactgctgttaatcgtgattgtctttccggctgcgctgctgatgctgcggaacaatccttcagaaaagaatacagagccgataggcggactggctgcatcagaaaaagaaacagcacccaaaacaacagctctttcagtggccgggatgtttcgtatgaggcaattctggttcttgatttttccgtttttgatctgtggttttacgaccgtggggctgatggatacccatttgattccgttttctcatgatcatggcttttcaacgacagtcacgagtgctgctgtcagtctgctggcaggctttaatattgctggcatcttgctgtccggaattgtagcggatcggtggagcagccggaaaatcctgtgctttttatatgcggtgcgggcgctgtcgatcgtgattcttatttacagccacgagccctacttgcttttaacctttgcgattctgtttggattagtggattttgcaacggtagcaccgactcaaatgctcgccacccagtactttcaaaactactcgatcggcctcatgattggctggctgtcactcgcccatcagatcggatcggcactaggtgcgtatgtgcccggcgtcatctatacggtaacgggtgagtatacactggctttttatttgtcgattggaatgctcgtgcttgcgagcgtaatgaatgtgatgctgagggagcctgcggcggtcacgcgtgacagtgcgtctgtggtagacaagtgatgaggacaaagggaaagcatctctgatttcgagattattcagagatgctttttttgtatttttgttctaatacgaagtcgatcataccgactatgcgggcgttttcggatttttgtttgaagcgttctgaaatttgaacttttcttgaaaatgggtaaacaccaaatacccatattaggccaattaacacaaaaaacatttgtacacccatttctattaaatcattataatgagaactgaaaaaataaatatataacgttattaatgttactgtaaatacgattttgacagtgtgtttgaatgtgagctgtggttcaattaaacacaatttcatttggttaagtgtgaaagagtcttgtttcattaggtacgaaagtaaatcattatcgttttgactgatagggtacaagtcagtttctattttttttgtgatctcctgatatttatgtatattacttttcatacagtatccccccttttttaagaagaactccatgaatccctacaggactcatggagaaacaatattatttaaaaagtgctaaaaatgtacggaagagtactgcagcagctcccatttcaggacctaccgttaatactaatgcaccaataccagcaacaattaagatacctgtacctaccacaagcatgttgttgacaatagtatcccaatctggtgagtatacttcctcagtatctggtaaagtaaagtgcttctgttttattttaaacgtaatcgtagtcgttagtccagttgtgatattgtcaccgactggaatatcaggtgtatagattttaatttgaatatttaaagattcagctgttggatttacataaacctccaaataaccgttgcgtactgataagctgagactatttaaaaggttttgataagagtcgatttgtgacgcagtaagagacgtttgagtgtcgcccaataaacccgtgatataggcacctggtttaccatttgtaatggtaattgtgtttggtgaaccttcacttggtatggttgccaaaagtgaagttgatagaataatatccaattcaggtgatgtgaaaatggtttctgtcgtatcaaattcaaacatcgcgtttgccaaacttgttagattttctaaagccggaatggtagataaaatgtctgtcagtgtacgcagccttgcatcatataccggatcagacggcggatttacattgcttgcacctgagtctcttcctgaaaatccgtctttatcaattccgatgcttccagaaccgcttccgatggttccttcataaaattgatcaaaggcccagttgtttggcataggatagccgagattgccgctaaatcctgttgacatatttgccacaaaactatactttgtcagttctgcttctgatgtacggatacaaatgtttcttggtccgtaaacccctatttcatacttaggtgcggttgaaaatgtctgcatttttgtaaatgctgacttaatctcttggaaataaggaatgattttatcggtcacttcataatcgtatgcatcaaaatcgacagcgaaataaatggtcgtgcctgacggaaaacctaatcttctagcaacagaagcggcactatatgcatctcttgtgccttggtctttgacaaaataagaagattcatagccgccgtcttgataaattgggaaaaccttcaatccggcatcaagaataactgcaagctctttagatgtcagggcttttgatgtgaggccgctgcttgtccgcacatttccggtcaaatatctgccaaccgttttataaccgttattccgcagtgtttgagctttttctgcggttataattgtagcagtgtcacaagcagaagcggcgcgagttgtgtctcctgagcttgataataaagctttaatggttggcatatctgcataacctgtttgcggcaggcacatgaactcttgaaatgctttaacagctgaaacaacacccacaccatatttgccgtcaaactcaccaggatcgaacgattttccgttacaatagagggcgtactgaacaattaagacaaatcctgttcttgaatcgccgggagttaaagtaggacacaaacttgtggtgccgtttccgaaaaatccattggcaacacttgtgctcatgccttcttctttttgcagggcataaataagagctttatttgtatcgcggccatacagtccgtcacaaggcattaacccgatatagtcattgtagtcccgatttaagttttgttgaatctggcgaattcttgaatcacccccagacaccagcttaaaagcgctcatgtctaataaggctttcataattaacgtggtgacaatcccatcctgtgttgtcagtccggcagctttttgaaattcttttaccgcattttctgttttttcgtaaaagacgcctgtaaaaccgccgggattaaagcctttacaccataaagccccttgtaaaataaaattcatgttgcttggttttgaatctggagcttggcgtttaagaggcttaaataagcgctgtgttgtcggcccgaagttatcggctggctctgagatacccaattcaatttgaagcgcccgagtcagaccgtagatcgtatcccacccagttttcccgctttcttcaactgggttatacccatgtttgccgctgtacgtatcgttcagccattgctgtgtgattaagaccatttcatcaaccatttcgattcctcctttgttagattgcgttcatttataggtggcaaacgtaggacaaaataaaaaaatggatgccgttaagcatccattttacatccgttctccaacagcttcgctttcggtttcagctctgaaatgtagaggcctaaaagtgtaagcgcgcctcctagaagagcgatccatgtcatgttttcgtgcagaatcaggacagaagcggcgatcgtgataaccgggaccatgtaaatatacgcactggatttgacggctccgagcacgccaactgaataattccaagtggcgaagcacagggcagaagcgccaattcctaagaaaagcatgttgagtatatttgaagcagatgaaaatcggcttaggtcaaaatggaagtcgaacaaaaataaagcgggaaccataaataataggccatacaaaaatactctctgtgtcaactcgatgatgtggtattcgtaagcgcttaattttttcatgaatatcgagtatccgccaaacacgagagcagccccggctgccatgatgtctccgagtggatttagacgcagtactacattgccgttaaacgtaatcaataaaagcccgatcagtgccgagacaaatccaatcaaaaaagtcagacgcagtttttcgccttcgagcagaaaatgggccaaaaccgcagtgatcatcggtataatggacacgatcatgccgacattggaggcgtatgtataggtgagagctatattttctaatagaaagtataaggttacgccaaataaaccagccccggcaaacaacagctcctgccgccaatttctgaacggaatcatgttggggcggacgaggataagagcgataaagcccatcaaaaaccgataaaataatatttccattggagagaagtcagccagcagaacttttgtcgaaataaaggtcgtcccccaaatcagaatggtcacaatggctgcgatatgccccgaagtttctctttgtatgttcatctgtgaagctccttttcaaaaatcttcatgtattgcttcggcgtcagccccacctgccgtttaaaaaacttcgtcatatggctctgatcgctgaatcctgtctgaaatgccgcatcaatcggccttaccccttgttcaagaagttttttggcttgattaatccggattgtttccatgtagctattaggagtaatgcctttttgttttgtaaatgaacgcaataaatgatacttgctccagcctgttaattcactcaaatcattgagtgtaacattttcggcataatgctcttctaaaaattcacaaaccattttgacttcgtctgatggttctggaacgctgctaaggaacgtgacatctgaataatggcggatcagctcttctaatagatgaagaaacagctcctccttacgcaaagcttgtttttcctcggatatcaaaatatgcaattcctgcaggctggctgtcagctcatggcggaataacacatgctgggagaaataagggagatgcccggcgccagtaatctctttcaccgccttctccatgatatccggcatgacattgatacaccgataatcaagcgtccggccgtcaatctgttcacagctatgcgtgtcacgggggttaaagaggagaagatcacctggattgatgatatattcttgatcctggcaggccagataccgttgccctttttcaataaatccaatcacataataatcgtgaaagtggttcgggaacttttgcataattcccttgaagcggtaggcttctatatgaaggtgtgggtcaagctgcagtgtgcgggtttcgttttgcatgggatgcctcctgtcggtgtggtggtcttggattaagtgtagcatgattttgggggatttcttgtatgatgttgctgtttaggaatagagaaagcagaccgttatttgtctgctttcgtttaagaatttaaaagattttaaccctcaataataattttatcttttttaataaaaatttatttttcaaatatttcagttataatggtttggaacagataggaggggcaaagatgtatcaatcaaagaaggttttattgttaggttcaggtgaattaggtaaagaggtagtgattgaagcccagcgtcttggggtacagacggtggcagttgacagttacgagcatgctccggcgatgcaggtcgcgcataacagttatgtcgttgatatgctggacccagagcagatcagaaccatcattgagaaagaaaatccggatttgattgtgcctgaggttgaggcgattgcgacggatgaattgctgaagcttgaagaggaaggatttcacgttatcccgaatgcccgtgcggccaagctgacgatggatcgggaaggcatcagacgacttgcggcggaaacgcttggacttgcgacagctggctatgaatttgcgaatacatatgatgaatttatacaagcggcagctcagatcggttttccttgtgtcgttaaaccattgatgagttcttctggaaaaggccaaagtgtgtgccgctctgaagcggatttagagagctgctgggagacggcgatggaaggcggacgggtgaaaaacggccgcgtgatcgttgaggagtttatccctttcgaatcagaaatcacactcttaaccgtacgtgcggttaacggtacggcattttgtgagccgatcggtcatgtgcaaaaggacggggattatatcgaatcgtggcagccgcatgatatgacagagcagcaaatagaagaagcgaagcatattgcgaaaacgatcacggatgagcttggcggatacggcctgtttggtgttgagctgttccttgcgaaagatagggtatatttcagtgaggtatctcctcgtccgcatgatacgggtcttgtcacgctggtgacgcaaaatttgtcagaatttgcgctgcatgtccgggcgattctcggctttccgattacagaaatcacacagctttctcctggcgccagcaggcccctcaaagcgccggaagaattagcggattacactgttgaaggattggaaaacgcactggcagtcccaaagactcaagtgcgcgtctttggaaagccgataacaaaagccggacgtcgtatggcagttgcgctttctgctgctgattcagttgaaacggcaagagagaatgcaaagaaagcgttggaccagctaattttaaaatagagtttgaacaggtcttgtcatgggacaaggcctgtttttttctttctccgtaaaagttttatcataagaatcagaaacctgattataatgtaaaagtcttccatcgatacgggtggttgacactaaaggagggagatgacaaaatgaaattagttccaagattcagaaaacaatggttcgcttacttaacggttttgtgtttggctttggcagcagcggtatcttttggcgtaccggcaaaagcggcagagaacccgcaaacttctgtatcgaataccggtaaagaagctgatgctacgaaaaaccaaacgtcaaaagcagatcaggtttccgccccttatgagggaaccggaaaaacaagtaaatcgttatacggcggccaaacggaactggaaaaaaacattcaaaccttacagccttcgagcattatcggaactgatgaacgcaccagaatctccagcacgacatcttttccatatagagcaaccgttcaactgtcaatcaagtatcccaacacttcaagcacttatggatgtaccggatttttagtcaatccaaatacagtcgtcacggctggacattgtgtgtacagccaggatcatggatgggcttcgacgataaccgccgcgccgggccgcaatggttcgtcatatccgtacggtacttattcaggcacgatgttttactccgtcaaaggatggacggaaagcaaagacaccaactatgattacggagctattaaattaaacggttctcctggaaacacggttggctggtacggctaccggactacaaacagcagcagtcccgtgggcctttcctcgtcagtgacaggattcccgtgtgacaaaacctttggcacgatgtggtctgatacaaagccgattcgctccgctgaaacgtataagctgacctatacaaccgatacgtacggctgccaaagcggctcgcctgtttatcgaaactacagtgatacagggcagacagctattgccattcacacgaacggaggatcgtcatataacttgggaacaagggtgacgaacgatgtattcaacaatattcaatattgggcaaatcaataaatacagcaaactagccatattcatgtctattttgtttttatgcgggtgcagttcgcagacgcattcttctcaaaaagaaacgactattcctgtcactcttcatgtggaggatgctaaggggctgccggtcgaaggggttcaagtgacgattgtcaaagcgccctcttcagatgaggagccgagtacagagattggcgagatactcggtaaaacagacaaaaacggagatatcaaatgggataccggcagaaaaggcgattactcagtcgcgttgacgaagggtgaaacatcagtaacccatcacatctcgttaacagaggataaaaaagatcatgccattccattagtcttcaaagaatagcagtttccttgattttaagggaactgccttttttatttattgcaggaaaccaaactatatactggaaatttattatgtgagataataagaaataggtattttttcttacgagacaaaaggggcgttatcctttatatcaatcaaacccggaggaaaaagaagaagatgatacaagattcaatgcagtttgccgcggttgaaagtggtctgcgcttttaccaggcatatgatcaaagcctttctttgtggccgattgagtcggaagcattctatgtttctactcgttttggaaaaacacatatcattgcaagtgggccaaaggacgcaccttcgctcattttgcttcacggaggccttttcagctctgcgatgtggtatccgaatatcgcagcgtggagcagtcaatttcgtacatatgcggtcgatataataggagacaaaaataaaagtataccatcagcagccatggaaacgagagctgattttgcagaatggatgaaagatgtctttgattctcttggacttgagacggcacatctggccggcctttcgcttggcgggtcccatatcgtgaatttcttactccgcgcgcctgaaagagtagagcgggcggttgttatcagtcccgctgaagcgtttatttcatttcatccggatgtctataaatacgctgcagagcttacaggggcaagaggagctgaatcatatatcaagtggatcacaggcgacagttatgatctgcatcctttactgcaaagacaaattgtggcgggcgtggaatggcaggatgagcaaaggagcctgaagccgacagaaaacggctttccgtacgtgttcacagaccaggaattgaaatcaatacaagtcccggtacttctgatgttcggtgagcacgaggctatgtaccatcagcaaatggcctttgagcgggcttcggtattggtgccgggaattcaggctgaaatcgtaaagaacgccggacatctgttatctctggagcagccagagtacgtcaatcaacgcgtcttgtcctttttatgcgggggataaaatagtaaggaacatgaaaagattggcattcatttttcaaaaggtaacaaatgttgtataataatagaatttgaatgctgctttttttgggagcattctatgttatcatgcttattggagaaaaatttttcctgtaacgctattcgatcactatcgtcaaataatatagatggttttacaattggaggtttggttacactgtgaattacatcccctgtatgattacgataggaaacttcatttgcggattgctggcgattcattccttgctatatcacaacattcattcagcagtgctttttatttttacaggcatgttccttgatttctttgacgggatggctgctcgtaagctgaatgccgtttctgatatggggagagaactggattcgtttgccgatctggttacgtttggggtggctccttctatgcttgcttacagtgtcgcgttgtataccctgccatttatcgggatcttatgcgcattgacgtacagcatttgcggaatgcttcgcctctctaaatttaacattgaacaaagcaagctcccgacgtttatcggtatgccgattccgtttgcgggcatgtgtctcgttattttaagcttcacctataacccgatccttctggcaatcggcacttgcggactctcatatttgatggtgagtaaaataaaattccctcattttaaaaaacatgcggcagaaaacctggagtctgggagatggaattagttcagcagctcatagcggattacggttatctcgctatttttttgatgctggtattaggaattgtaggattgccgattccagatgaagtgatgatgaccgttgttggctatttcacgcataccgatgtattgaattatgagctttcgatattgattagttttgtcggggctttgttaggtatgctgatcagctacatgattggcagaaaagccggacgcccgtttattgacaagtacggcaagtgggtcggcttaaaagaaaaaagaatgatgaaagtggaaaaatggatgaagaaatacggtccatattctcttattttaggttattttattcccggcgtcagacatgtgacgtgctacttttcggggatcggcaaaatggatctgaaaacgtatgttgcgtttgctgcaatcggcgcctttttatggtgctttgtttttattacaatcggaagggttatagggattattcatgtttaatacggctgtaaagattctgtatcgatcattgatagagctgacgaatcatcgtttgtcatcctatctgattaaaggattttgcgagtcgaaaatcagcaaaccggtcattccgcttttctcaaaacattttcggctgaattgggatgatgtggacggtacggctgctgattacggatcgctgtccgaattgttcattcgacaaataaatctggagcggcgccctgtgtcaaaagaggcgcatgcggtggtcagccctgttgacggtgtggttcagacggtaggaatcatcaacccgaatcaaacctttacggtgaagggaaaagattactcattcgctgagctgaccggctgtaaaagcgcagaccatcaatacaatggcggttacttcgtcgtgctgtatctaagcccgaggcattatcaccgtttccattctccgatcagctgcaggtatcaaaagctggccgagcttggaaatcgctcatacccggtaaatcaactaggcttaaaatacgggaaagatgtgctgtcgaaaaattaccggtttgtgtacgagctgaatagcggcagccgaaatctcctgatgattcctgtcggcgcgatgaatattaattctatcgtgcagacgaatacccgtactgaattggagatcggcgaagagctgggatacttttcatttggctcaacggtcattttgatttttgaaaaagacgcgttccagccgtccgcccatttagcagaaggccaagaagttcaagtcggagaactgataggttatgaagagtaaaaagaggagcttgcataaacgcagcgcctctttttttgaagaaaggtgagacttatggagaaacaaatcatcagctggattacagattatcagaacaccggagatgaagccgtcctgcggcaagtgcgagaagtgtgctggccgatcgttgaagcggttttgcatgagaaggcaatagatgatgaacaagcgaacaatttacgcgacaaaggaatcgagcggtttccattcatcatcagcaaataccaagcggatgtgcagcttccggttgagacatttttacgaaatacgtatcggttttactttcatcaggtgatgagagaatccagctaaagcttctttcaacagagaagcttttttttgttggcaggaaaaggaaactttttctatatctatctcgtaatgactagagaacctagcagaaaaggagagatagaattgaaacgaatgatagtgagaatgatcctgctgctgctgattgtctgtctggcgttttcttctttttcagtctcggcacgtgctgcttctgaagaaaaacattgggagcgctggattgaacgacatgcacagccactggatgcttccaatgcttcaaacaaagaccttcactttctgaagaaggtgctgaaaggaaaacgaatcgttcagttaggagaaacgacacatggcgctggcgaaatcaatgccacaaaggtcagaatgatcaaatacctccacgaagagctgggatacgatgtattggcctttgagtctggcttccctgatacaaatgcatcctaccttaatatggaccaattaacccctaaaagcacgatgaaaaactccatttacgctgtatggcacacagaagatgtcgttgaattgtttgattacatgaaagagcaaaaagagaaaggcgatccgctgatccttaccggttttgatattcaaagcatgaagaattcattcaatgatgctgcgactcattgggtaaaagcggtggaccctgagaaagcagagttgctctcccaatcagaaaatgatttttcaacattagtgacagacagcaatacgtttgatgaattttcgcaaaagaaggaaaagcttgtgaaaaactatcagaagctgatcaagttcactaaaacacatgcttcagagctaaaagaaaaccttccaaaagagccgaaagcttatgagatgtttatgcattctcttcagctgagaattgacgtaatggaaacgtatatgctggaagaaatgaaagaaaaactagaggagtatccggagaatattgaggatttttcattctttatgagagaccgcatgatggctgaacaatttcagtgggtagctgacaccctttatccgaaaaagaaaatcattgtctggggccacaattaccatctacgcaaacagaatacgaagatgataaaggactgggtacagctaaatggccctaacatgggtgattatttgccggagcggctgaaaaaacaaacatatacgattggcatttatgcttactcaggtgcgagtcttgatagctccgataataagactgttaagccggttacaagcccgccgccgtctgggagccttgaagctttgctgaaagcggcggaccgaccggctgtttttgttgattttctccatacaaaaaacaagaaaggcacttcgtggatgtataccccccgcacagcactctattggggattcacagaagagcagctgatccttaaggaacaatatgacggtgtcatttggctggagcatatcacaccatctgtcattatcaagtgagcggtgtcccctgtggtaaacaggggatttttacatatcgcaaaaataatcaaaacatataatccgtgatccattattctaaaacagaaaggagattggagcgtgcaatgtattatgaaaaagctgtccagaaaacaatcaattggattgaatcacatttacatgagcaaatatcaaacgaggatattgttaacgtttcaagcttttcaaaattccattttcatcggatttttcaaaaagaagtcggcatgtcggttgcttcttatattcggttaagacgtcttgcgaatgcggcggcagctttgctttatacagatcatcgtattatcgatattgctttgtattatcagtttgaatctcaagaagcatttacgaggacgttcaaaaagatgtatcacatgccgccaggagcataccgaacatttatgaaacgctttacttcaaaaaaggaggaatcttacatggagaaaaaaatgaaaggctgggtattgagcgggagccatccgttccaattcgaaatggggattgaccgggaaaatgtacatcagggaaaagcttcagggtatttaaagtcaacgatggttcaggatatcggtgaatttgcgacgatgatgcagcaattcaaagcagatcgctatctaggaaaaaggcttcgtctatcaagttttatcaaaacaaagggggtgcagcattttgcctcactttggatgcgggttgacagtgctgctgatgatgttctccaatttgataatatgagcaacagacctattaccggaacaaccaattggaatcattatgctatcgttttagatgtcccagaaaatagcgctgtgatatcttttggcgttcaattatctgggccgggtcaggtgtggatggatcatgttgtttttgaagaggtagatgagagcgttccttcaacaaaccttgaaatgccgggagaacttttagatgaaccggtaaatttatcttttgaagaggaactacaaaaatagttttcagacaactatttttattagtgagttattggaaaatactatttgttattaataaacccttgtgctgcttaggtttgtaagagcttggatatttttatcagtctgggcggatctgttcatctttgcggcattttcctgtatgatatagtaagagtgtgcatagcaactaactataattgaacagggtgtttaaaacatggaaaaacaatacagagtattactttactataaatatgttccgattgaagatccagaggcgtttagagagcagcatttggctttttgtaaggagcttggtttgttaggccgtatccttgtttcttctgaaggaattaacggtacggtatcaggtacggttgaacagactgaaaaatatatggaaacaatgaaagctgatcctcgttttgcggacatggtatttaaaattgatgaagcagaaggccatgccttcaaaaaaatcttcgtccgccataaaaaagagcttgtaacgcttcgtcttgaagatgatgtcgatccgaacgaaacaacaggccagcatttgaagcctgcagaattttatgagaagatgcaggatccaaacacaattgtcatcgacgcgcgtaacgattacgagtatgaccttggccatttcagaggtgcggtccgtcctgacatcgaagccttccgcgaattacctgaatggatcgaagaacacaaagatatgcttgaaggcaaaaagattttaacgtactgtacaggcggcgtacgctgtgaaaagttctcaggatggctggtgaagcaaggctttgaagatgtagcacagcttgaaggcggaatcgtgacatacggaaaagatccagaggtgcaaggcaagctttgggacggccagtgctacgtatttgatgaaagaatcagcgtgcctgtcaaccgtgttgagcatgtgattgtcggtaaggactactttacaggagaaccgtgtgagcgttatgtgaactgcgcaaatccatcttgcaataaaaaaatgatatgcacaccggaaaatgagtataaatatatgcgcagctgcagccacgaatgccgcacgaacccaagaaacctgtatgtgaaagagcataatatgacagaagaagaagtaaacgcaagactggcagcgattgaaacagaagatcacgctgctgctgaataaaaaaagaacacctcgtattgaggtgttctttttttctatatgctttcagtttggctgtttgcggaaacccattctttttggcggaaggccttttcccattttgataccacgatacaggcgatcgcatgtcccggtacgttcacgcccgttctcgccatgtccatgacgcggtcaacacccgcgataatggcaacgccttcagccggcagtcctacagcattggcagtcgccagaagaactacaagcgatcctgagggtacagctgcaatgcctttactggtcatcacaagcacaagcatcatgagcagctgctgggacaatgtcatgtctacttgaaaggcctgtgcgagaaagatacaagaaactgataaatataagctggagccgtcacagttcaatgacaagccggagggaacgacaaatgataccactcgtttgggacagccgtatttctccattctatccatcagctgagggagaatggtttcagtgctggtggtggaaaatgcaattaaaaacagatcccatatcattttcaatacttcgaaatacttaatctgaaagatgagaccgacaagcggaaagaggacaaagaggatcaggaacaggccaaggaatacggtgccaaccagcttaaacatagggaggaggagttcaatgccgtattggcctacagaagctgccatcagggctaacacgccgataggagcagtgaccatgacgatttgtgtgagcttgaacataatctgagcggtagattcaaagaacttcatcactggttcagaagctttgccgataccagcggcggcgacaccaaataaaatggcgaagaaaataacggcaagcaaatcatttctggccatgacatcaataatgtttgtagggataatatccaggatcatttgcttgaaatcaacaactttgtctgtgtagccggaaagttcatggatatctttttttgccaaatgggagaggtcaagcccgacacctggttttaagacattcgctaataaaagtccaagccctaataccaacgttgtaatcacttcgaaccaaatgatcgtcttgatgccgagactgcccatttttttcatgcttccgcttcctgctgctccaatgacaatggtagaaaatacaatcggcacaacaatcattttaatcaggcggataaatccatctccgacaggcctcagtgccatcccgaaatcaggaaaaaagtggccgatcaccgcaccgacagccaaagcgattaaaatttgaaacgcgattaattttttcaaatgaatccccctttagaacgatagaatgtaggcatattcatatcattcgtgattcaaatgcaaacaccttttttcaagttattttattttgacagcgctttcattatgttggcgaaaaagtcccccgcagcagggggacttttttacttcatttgaatgtgctttagatcttcttcagaggtatttgtgaaaataaccggtgttatggctgaagcggcatgctgcttgatgtaattgagatcaaaggtgagaagcagttcgccttgtttgacggcttgtccgcttgtgacatgtgcttcaaagccttccccattcagtttgacggtatcgatgccgacatgaatcaggatttcagtgccgccggcgctcataaagccgatggcgtgttttgtcggaaaaatcgagacgatctcgccgtccgcaggtgcaacgacttttccttctgatggtataatcgcaaatccctcgcccatcattttttctgaaaagacttgatcaggcacatcccctaaagagactgtttctcctttaatcggataaaaaaaggtctcaccggaatcgggcttctgcggtttgtcagttaccgtgtccagcgtggcggcggtggcagggacgcctccggccatgattgttttgatgtcgtcttttaaggcatcggacttggttccgaatattgcctggaagttgttgttgacctccagcacgcctactgcaccaagccgttttaattcatcctttctgacttgacttggctgatgaacggtcacacgaagccttgtgatacacgcatccaggttagcgatattttgctgtccgcccaaggcctgcaacacgtgaaaggcaagttggtcttttgcaactggagctttctcctcattctgaccgtcttcatctgtctcacggccgggcgttttcaaattccatttcagaatcgcaaatcggaacaaataataataaatgaaagcaaacacgatcccgacaggaatgacaacccagccgtttgtagacagtccgtagttcaagacgtagtcaattccgccgcctgagaacgtatagccgtggcggacatggaataaatcacaaacgacaaagatgacgccggcaagaatagagttaatcaaatagagcacgggcgcaacgaacaagaaagaaaactcaaccggctctgtaattccggtcagcatagatgtgagcgccgcagaaatcatcacgccggagatcatttttttcttttccggacgcgcggtatggataatggcaagagcaactgccggcagacagaaaatcatgtaagggaaatcccccatcataaagcgcccggctgtcgggtctcccgcgaaaaaccttgtcaggtctccggttacggtgttgcctgttgatgggtctgtgtattctcccatcataaaatagaaaggcgtataaaaaatatgatgcaggccaaaaggaatcagcaaacgatagatcgttgcataaaagaacaggccgactgttgaatcggcaattaaactgctggctgcgttaattccgttttggattagcggccaaacgaatgagaaaatgacgccgatcaccaatgaactgacggaagtaataatcgggacaaagcgttttccagagaaaaatccaaggaccggatgcagctcgattgatgaaaatcgcttatataaataggcggcgagaagcccgataatgattcctccgaaaacccccatatcaatcaggtgctcggctccttcatacggaggctgaaggccgagtaattttcccatattgtcgagggtgacggttaaaattaagtatccgatgacagctgcaagtccggctacaccttctccgccggctaatccgatcgcgacccccacggcgaaaatcagcgggagattatcgaatacaacgccgcccgcatcctttataatagggatgttcagtaaatccttgtctccgaaacggagcaaaagacctgctgccggcaggacggcaaccggagtcatcaacgcgcggccaagctgctgcagaatttgaaatgcctttttaaacatgacagtctccttttattgtgttatgagaatgatgcactctttaatttttgagctgctttataatcggcgataacggttacatgattgtgtttttgaagaatagaggctggtacatctgtcgtgacaggacattcagccatcttttgaatagcgtctgctttttcctcgccgcttgctaaaagcacaatatgtttgctgaattccatgatggttttaatgcccattgaaatcgcgagtctcggaaccagcaccggatcgccgccgaagaatctggcatttgcctgtatcgtgctttccgagagcttcacaacacgtgtccggtcttcaaaatcagatcccggttcattaaaaccgatatggccattggcgccgatgccgagaatttggacatcaatgcctcccgcctggcggatgagatcctcgtatactttgcattccgcctcaagctgcgggttgtctccttgcgggatatgaatatgatcaggctgcatattgatatgctgaaatagatgctcatgcataaagtggttataactttgcggatgagatggagagagaccagcgtattcatccaaattaaatgtagtaacctttgaaaaatcaatttcgcctgcctgatagtctgaaatcaactgcttatacaagccgaccggtgtgcttcctgttgccaggccgagaacggtatctttcttagcttgtatttgttctttaataatggcagcgcttaacttacagagttcttcgtagtgctcggcgattagaatcttcatgtgacaccccctcaaagagatagacaagcaccatatttgttatgaccaatttatgatacttgtcattacgaatttagcaccgcccttatcaaactgtcaatattaatttctgaaaatttgttataaaagaaggatacaaatctttcatattgggatggcaaatggtattatggtctcaatgaaaaagaacggattgcatacagaatggggagaatgaaatgacagctttatattctgtgatcaagtttaaaatcattgagttgattaaatcgggcaaatatcaggcgaatgatcagctgccgacggagagtgagttttgcgaacaatatgatgtcagcagaacaactgtgagactggcccttcagcagctggagcttgagggatatattaaaagaattcaaggaaaagggacatttgtatcggcggcaaaaatacaaacgccgattccgcataagattacgagctttgcagaacaaatgagaggccttcgttctgaatcaaaagtgcttgagcttgtggtgattcctgccgatcactccattgccgagcttttgaaaatgaaagagaatgaacctgtcaacaagcttgtcagagtcagatacgccgagggggaacctttgcagtatcatacctcatatattccctggaaggcggcaccggggctggcgcaggaggaatgcaccggctcgctgtttgagttgttaaggacaaaatacaatattgaaatcagcaggggcacggaatcgatcgaaccgattttaaccgatgaaacgatcagcggccacttattaaccaatgtcggagcgcctgcgtttttatcagaatcccttacctatgataaaaatgaagaagtggtggaatatgcgcaaattattacccggggagaccgaacgaaattcaccgtagaacagtcatatcattcataaagcaatgtgttttaagaagggaatggtggttctatgtttttatttacgaatggaaaagtgctgtggggagcagtgattgctgcattcatcctttcaattgtattttacccttttctgccgacgcagatgccgattcattatgatgttgcgaacagtccggatctgacggttaacaagctggcggggactgtgatgctgcctgttttgatggtggtgtttgcatgggcgcggaagatcaattggcaatttgtattcgcagtgtatattttgctgatttgccacattgtcgtcctttgtttagcgctctaaatcaaacagccagaataaaactggctgttttctttaatttcagcttcatctgacaatgaatgtggtgtataatagctgatgatcctaaagaatattctgaaatttatcggtgtggagcggcgtatcatgaaaggaagggctgtatgttttttgcagctttaaaaagactgaatatttaaacaattatatgaaaggtgtgctgatcagattgaataagcttattgaacgagaaaaaactgtatattataaggaaaagcccgacccgtcttccttggggtttggacaatattttacagattatatgtttgtgatggactacgaagagggaattggatggcatcatccaagaattgcaccgtacgcaccgcttacgctcgatccgtcttcatctgtttttcattacggccaggctgtttttgaaggattaaaagcatacagaacagaggatggcagggtgctcctgttccgtccggatcaaaatatcaaacggctgaacagatcgtgtgagcgcatgagcatgccccctttagacgaagagctggtgcttgaggcattgacacaattagttgagctggagaaagattgggttccaaagaaaaaaggaacgtcactgtatattcgtccttttgtcattgccacagaaccgagtctcggtgtgaaggcatccaggagctatacatttatgatcgtgctttcgcctgtcggctcctattatggcgacgatcagctgaagccggttagaatctatgtcgaagatgagtatgtgcgggcggtcaacggtggagtcgggtttgcaaaaacggctggaaactatgcagccagtcttcaggcacagcggaaagcgaatgagctgggctatgaccaggtgttgtggctggacgccattgaaaagaaatatgtggaagaagtagggagcatgaacatctttttcgtcataaacggggaagctgtcacacctgctttaagcggaagcattttaagcggggtgacacgtgcgtctgcgattgaactgattcgaagctggggcattccggttcgtgaagagagaatatcgattgatgaggtgtatgcggcctctgcacgcggagaattgacagaggtcttcggcacaggcacggcagcagtcgttacgcctgtcggtgaactcaacattcatggaaaaacggtgattgtaggcgacgggcaaatcggggacctctcgaaaaagctgtatgaaacgataacagatattcagcttggcaaggtgaagggcccgtttaactggacagtggaagtgtgaaaatcgaaaaagaacctgcctgaaggcaggttctttttattttgaataagtcatatcagcagccggctcgcttttgcggttttttacataatatattgcatagcaaatggccataaatggaacgccgcaatagagtgcgattctttgattcggatcaaaggcaatgccaacaacggaagccaggcataacaggaacgcagcaatcggcacgaacggatacaaaggggttctgtatttcaaatcagtaaccttgtttcccgcttcgatataacgttttctgaacatgaattgagaagcagcgattcccatccacacgacaacgacggcaaaaccggaaatcgacacgagcacaacgtatacagtgtctggcgcaaatacgctggacagcaacgacagaatgccgccgatcatgctgaacaccagcgcgttaaaaggggttccttttgacgtcagctttgcaaatgtcggatgaagcgttttttcttttgataaagaccacagcatccgggaagaagcgtagagtccggaattagccgctgacaggatcgctgtcaggataacaaagttcatgatatcggctgcgtatggtacaccaactctgtcaaaaacagcgacaaacgggcttttgatgacacctgcatcttgaatcggaatcagccctgacagcacaaaaattgttccgacaaagaagagtgagagacgccagaccgttgttttaatcgcttttggtatcgtcttgtcagggtcaacgctttcaccggctgcgattccgattagttccgttcccgaaaaggcaaaattgacggacagcatcgtcatcaaaatcgggacaaatccatttggaaaaagcccgccttccgcggtgaagttggacagcatcggagcggcttctccgcctttgatcggaatgatgccgaacatggcagagccgcctaaaagaataaataatacaatggctaatactttgatgctggaaaaccaaaattctgattcagcgaaaaacttgaccgaaaatgcgttaagcaagaaaatgaacagcgcaaagacggcactccacatccaaaccgatgtatgggggaaccagcgctgcattaacaggccggctgctgtgaattctgatcccaatgccacggtccatgttagccagtacagccaagcaaccgtaaatccggtgcccggccctatgtatttggctgcataggtgtgaaaggcgccggtcacaggcatggcgactgacagctcaccgaggcatagcatgaccagatagacgatgccggccccgactaagtaggcgagtatcgttccggccgggcctgcttgctgaatggtataacctgagcttaaaaacagcccggttccgatgacacctcccaaggaaagcataaagaggtgccggcttttcatacttctctgaaagtttgtctcattcttgttgtgggcagagttcatctttttccaactttctataagcgatttatttcctcctaataaaaaatctcatgtcaggaagtgacacgagactccggcgaaccggctttaagttagaatatacaaactattccgataagtcaagttgtttttaaagagcgggcccaagccgcaatttcttgaatatcttcgggttttgtccggcagcagccgccaatcagtctcgcccctttttcatgccaggtgcgggcgctcgccccgtaagattctgcgtatgctgcgccgttccacgtttttgtttccggatcatattgctcacctgaattcgggtagacaatgatcggttttgacgtgttcttttttaactcctctatcaaggaagggatatgctgaagcggcgtgcagttgatgccgagtgctgcaatttggcggtgttcatcaagccacgatgcgcagtcagctgcaggtgctccgtcactgatatgcaagccgtctttagcactgaagctgatccacgcatacgtttcaggaaattccttcaacagctgaacaatcgctttggcttcagtcagacacggaatcgtttcgcatgccaaaacatcagctccggcttcaatcagcgccttcatccggggacgatgaaattcaatcagttcatcttctggtattgcgtagttgccgcgatattcagacccgtctgcaagataagcgccataagggcctacagaagccgcaatgatcggctttggccgattcaaacggttctcttcaagcgaccaaaattcatcgcgtgcttcagctgcgatgctgacggacaactcgatgagccggcgtgcttccgcttcgctcagcccgcgtgcggcaaagccttcaaatgtagactgatagctggcggtgattgcacaatcggcgcctgctgcgaaataatcagtatgaacttgtttaatcagctccggctcttccatcaggatttttgccgaccacagactgtcgttcaaatcacagcccttgcgttcaagctcggtcgccatggcgccgtctagcacaataagcgggtatgtatctagtatgtgttggataggattcatagaatgtacctttctttcagatttttttgaaaaagatatgaaaatcgtaatggaggcttacgtgtttgtcaataaacgcaaaaagagaaaggtgttcagcccatatgtctgaacacccttttcttatgatatttgtttgttgtgcgtgtcagtctttgtgtctgaaaccggccagcactcaatgccattatggtttttgagcacatctttataaaagacaggatctttgcctgcttttttctggcgtgtatagtctttcagcgccgtaaaaacaacctttgatagtaagaaaatagcgattaaattcacgacgaccatcaaacccatgaacaaatcagcaagatcccagacgagctggactttggcaacacagccaaacacgatcattgccagcacgccgatacggtagacaaaaatcagttttttgcttttgttcaaaaagccgatattggtttcgccataataatagtttccaattagagcacagaatccgaataacaaaatcagaatggccagaaagcctgatgcccatgatccgacatgggagctgagggaggcttgtgtcaaggcgattccgctcagacccggagtatgataggcatccgaaaacaggatgataaaggcggtgcttgtacaaatgaccagtgtatctgtcagtacaccaaaagcttggatcagcccctgtttgacgggatggcttgttgtggcggtggcagcggcattcggtgcgcttcccattcccgcttcgtttgaaaagattccccgtctgacgccttgcatgagtgccgcgcccaaagccccgccggcggcctgatcaaaaccaaacgcatttttcacgattagcgcaagcacacttggcagctgcgtaatgttggtgaaaatgacgaaaaacgcaactccgatatacaggacagccaatacgacgacaatggattcagccagctttgcaatgcgcttgactccgccaaaaataatcgtgccgaatacagcaattaaaatgagtcccaatgtcaggcggtttgtgccaaacgcgttttcaaaggcaaggctgactgtattggattgaaccgagttgaagacgataccgaacgataaggtgattaacacagcgaacagcgcgcccatccaccttttgttcagccctttttccatgtaatacgccggcccgccgcggaagccgtttacatcttttactttataaatctgagccagtgtgctttccacaaagctggatgctgatccgataatggcgataatccacatccagaagattgcaccgggcccgccgagtgcaatggcgatggcaatgcccgtaatatttcccgttccgacacgggccgccatgctgatgcaaaaggcttgaaacggagaaatgctgttttttgaccgggaagcagcaccttctcttaataccctgaccatttctttcagcatgcgaacctgtaaaaacttaagcctgaacgtaaaatagattcccagagaaaggagcaaaacaattaatagctttgaccacaaaagatcatttgcaataccgacgatatgttccaggatttgctgcatacaatcacctcttttttcatatttaaaaaatgctgagctcccattcctgcgccatatgcttcagcagcataccgccagtgaggctgttgccgtattcatcaatggcaggcccgtaaatgccgatgccgcatccggattgaaaaggctgttctcttctggcgcttggaggcaccagcgccatgatgccgccggagacgccgcttttggccggcacgccgacaaacgccgcatatttgcctgaagcgttgtacatgccgcacgtcagcattaatgccttggctaattttgccacatcttttggaatcacctgctcgcgtcgaatcggatgatacccgtcatgagcaaggatcaggccgatcaacgcaatatcttctgtggtgctctccatagcgcattgcttcaagtacacctcaagtgtttcttctacgtcagcttctaaaaagtttgtttcttttaaatagtaggccagcgctctgttgcggtgggcggtttcccattcagaacggaatacttcctcatgaattctcggccgttttcctatcaaagtttccatcaccgagtaaagaaactcgagcttttcgtatgccgattctccgggaaggatcgaagcgatggtgagggcacccgcgttgatcatgggattgaagggctttcccggcttgttgatttcgagccgaatgattgaattaaaggcgtcgcctgtcggctcgacatctacgcggtccagcacatagggaatgccgcggctcatgcaggcggcaataaagctaatcacttttgaaatgctttgcagggtaaaagagacgttccagtcgccggcgtgtatcatcgttccatcaggctccaatacacagatgccgagctgtgaatcattgacttttcctaaagcggggatatagtttgcgctttgtccattggcggcaaaagggcgatagtattcaacccaatcatgaagctgtaacgccggatttatgtctttctggtgctcttttatcaattctttcatcgaattcctcctcactgatttttttcttaaaggactgaggtgtatcaaaacgaaggctaaaggggcgttaaacgctttcataatagcggaaggtataattactgtataatggagactacagaatcatacaaaatacgacaaaaacattttgaaaataagcagtaagatttataaaaacctcatgttctgggtcaaaagcaatttgcaggttttctcccgattccccaaaataaaaagcgaggatgtgatcaacataaaactggaacggtttattgaaaaagacggatatatactggccctcatgctaattacggtgccgctggccggtgaactgaaattttatcccctcaatgaagaattccgggtcagctttggggcaccggtttttttcttctttttatcgttgttgcggcatgtgcccgctgtgctgccgggttttctgactggagcggctgttttcatctttcgcgtctttctggaattatggggcggaggacacaatgggctgactccgattctgtatgatcaagcgtctggctttttcttttatatgacttacgcctgtctgttttccatattaaaggccaatcgtttccgtgaacggccgattatgctcggtttcattgggtttatgattgaagttgtgtcagattgtgtcgagctggctgtgcaatttctcatttttcatacggttgttacgcctgagaaaatcactgacattgcggtgattgcgatttctcacacatttattgtgatgagcttttatagtgtgctgaagctgtatgaaacacaatcgagagaaaaacagacaaggcagcagcacgagcacatgctgatgatcgtttccaatttatatgaagaaacggtgcacctaaaaaagacattgaaaacgacagagaaagtgacaaacgattcgtatcagctctatcgggaaatgaagggcaaggatgttcagctgagcggcagaatcctgagactggccggagagattcatgaagtgaaaaaggacaaccagcggatattcgcagggctttcaaaactgatttcgaatgagagtttgagagattatatgagggcttctgatttgctgcagctcgtgattcgaatgaatgaaaagtacgctgaagcactagggaagcagattgatttttactgctcgatcgagggagagcatgacgaatatcacgtatttatcgtgctttcgatcattaataatctaacagcaaatgcggtagaggctatggatgaagagggaatggtcagcctgaggctccgtaagccaaatgagagtatggtagaattccaggtggaagacaatggccccgggatttccgagaaaatcggagacattgtgtttgacccgggctttacttcaaaatatgacgaatttggcacgccttctacgggtatcggactttcctacgtaaaggaaatcgtgactgagctagaaggggatatcacgtttgataatcagcagcggggagtggtgtttgccatcaggctgcctgtccggcatttgattcagaaagggtgaaccgaaagctatgcgtttttttattgcagatgatgaccgtgcagtgcggtcaattttaaggcagatcattgaggacgaagatctcggggaagctgttggtgaagctgacgacggaagccaagtggaagggcatatgctgcaatttaagcagattgatattttattaatcgatctgttaatgcccggaagagacggcattgagacgattcgtcagatccagaatacgtactccggcaaaatcataatgatctctcaagtggaggcgaaggaaatggtcggggaagcgtactcgctcggcatcgaatattttatccataagccgattaaccgcattgaaattgtcacggttctccaaaaggtgaaggagcggattgagcttgaacactcgattggagccattcagcattctctaagccggcttgtcaatcggactgaacggaaagcgcgtccccagcagaagagtgacagcggtttaaaagaggcaggaacattcctgttgtccgagctgggcatgatgggagaaggcggcgcacatgatctcatggcggtcctgcagtatttagcagaacacgagcaatccgagccgcacgaaaaacaaagcccttcgctaaaacaaatattcacccaagtagcgctacggaagctgggcacaggggcctcacagacggaagtcaatcgcgaaatgaaagcctcggagcagcgtatccgcagagcgattattcattcgctgcaccattttgcttcactgggcacaactgatttttcgaatccaaaatttgaaacctatgcatccaaattctttgattttccggttgtcagccagaaaatgaaagaactccaatccaaggatgcaaaaccccttgcacctgctagaataaatatgaaaaaattcatccacgtgttttttttggaagcaaagcttttgcatgagacgatgaaacaaagaaggatataaaccaaacagccggctgaccaggctgtttttttgctgcgcagaatcccggccggacagtgattcaccgcttttttataaaatatcagaaaataaagatattgacttattgtttatttgtcttacaattaaacaaaaggatatatggggaaggagcggatgtgaaagaaaaattaataaaagcgcttacagatagaggctgtatacacaaataacaggaggttatgttgatgagccgtatcagaaaagcacccgctggaattttaggttttccggttgctccttttaacacacaaggaaaactggaggaagaagctctttttcaaaacattgagtttttgctgaatgagggcttggaagcgatatttatcgcttgcgggtctggtgaattccaatctctcagccagaaggaatatgagcaaatggtggaagtcgcagtctcggcagccggaggaaaggtgccggtctacacgggggtgggcggcaacctcagcacagcgcttgattgggcgcagctgtcggagaaaaaaggcgccgacggctacttgattctgcctccgtatttggtgcatggcgaacaggaggggctgtaccagtatgcgaaaacgattattgaaagcactgacttgaacgcaattctttatcagcgcgataacgccgttctctctgttgaacagatcaaacgtctgaccgaatgtgaacagcttgtcggtgtcaaagacggggtaggaaatatggatttgaatatcaacctcgtctatacgatcggcgaccgcttaggatggctcaacggaatgccgatggctgaagtgacgatgccggcttatctgccgatcgggttccactcttactcttcagcgatttcaaattatatcccgcatatttcgcgaatgttctatgatgcattgaaaaacggaaatgacgagcttgtgaaggaactctatcggcatgtgattctgccgatcaacgacattcgcaaacaacgaaaaggctacgccgtatccttgattaaagccggtatggaaatcatgggtttgaatgtaaggaatacagccagaccgcctgtcggcccggttgaaaaagatcattatcagcaattggaagcaattttgaagcaggcggctgaccgttttccgaaaaaagccgcgacggtttgaccagaaaaaacacgaaaggggcaatgggcatgtctgtgatcacggaacaaaacacgtatctcaactttattaacggagagtgggttaagtctcaatcaggcgatatggtcaaggtcgaaaaccctgccgatgtgaatgacattgtcggatatgtacagaattcaacggctgaagatgtggaacgtgccgtcgccgccgccaatgaagccaaaacggcttggagaaagctgacgggtgccgaacgcggccaatacttatacaaaacagcggatatcatggagcagcgcttggaggaaatcgccgcctgtgcaacgcgtgaaatgggtaaaacattgccggaagcgaagggagaaacagcccgtgggattgccattctgcgctattacgccggagagggcatgcgaaaaacgggtgacgtcattccgtctactgacaaagccgcgctcatgtttaccacccgtgttccgctcggtgtggtcggcgtgatttctccgtggaacttcccagtggcgattccgatttggaaaatggcgccggcattggtatacggcaataccgttgtcatcaaaccggcgacagaaacagctgtgacatgcgcgaagatcattgcctgctttgaggaagcggggctcccggcaggggtcatcaatttggtgacaggcccgggttctgttgtcggtcaggggcttgctgagcatgacggtgtaaacgccgttacgtttaccggttcaaatcaagtcggaaaaatcatcgggcaagccgctttagcgaggggagccaagtaccagcttgagatgggcggcaaaaaccctgtcatcgtagctgatgacgctgaccttgaagctgcggccgaagctgtcataacgggggccttccgttcaaccggccagaaatgcaccgcgacaagccgtgtcattgtacaaagcggaatttatgagcgctttaaagaaaaactgctccagcgcacaaaagatattacaatcggagacagcttaaaagaggatgtctggatgggaccgattgccagcaagaatcagcttgataactgcctgtcatacattgagaaaggcaaacaggagggggcttcccttttaataggaggagaaaagctggagaacggaaagtatcaaaacggctattatgttcagcctgccatctttgacaatgtgacatctgagatgacaattgcccaggaggaaattttcggtccggtgatcgccttgatcaaggtggactcgatggaagaggcgctgaacatcgccaatgatgtgaagttcggattaagtgcatccatcttcacggaaaacatcggccgaatgctttctttcattgatgaaatcgatgccgggctggttcggatcaatgcagaaagcgcaggtgttgagctgcaggcgccttttggcggcatgaagcagtcgagctcccactcccgagaacagggtgaggcagcgaaggactttttcacagcgatcaaaaccgtttttgtgaagccgtaatggtgctggaaagaggcatgcgtctctttcccagctttatcacagccagcatatgattctctactttgaaaaggagaagatactatgaaaaaagactttgcgaatgttacaccggcgggcaaaaaaacgtccgtgcgctggttcatcgtgtttatgctgtttcttgtgacctctattaactacgcggatcgagcgacgctttccatcaccggagattccgtccagcatgatttgggattggactcggtcgccatgggatatgtcttttctgcctttggctgggcctatgtcatcggacagcttccgggcggctggctgctggaccgttttggttcaaagactatcattgcgttaagcatctttttctggtcgttttttacgctgctgcaaggggcgattggctttttctccgccggcacagcgattatcctgctgtttgcactgcgttttctggttggtttatcagaagcgccttcatttcccggaaacggcagagttgttgcctcatggtttccaagctccgagcgcgggacagcttcagccttttttaattcagcacaatacttcgcaatcgtcattttttctcctttaatgggctggcttacccactctttcggctggcattccgttttcgttgtcatgggtattgcaggcattcttctggctgtcatctggctaaaaacggtgtatgaaccgaaaaaacatccgaaggttaatgaagctgagcttgcgtacatcgaacagggcggcgggctgatttccatggatgacagtaaaagcaaacaagaaacagaatcgaaatggccgtatatcaaacagctgttaacgaaccgcatgctgattggcgtgtacatcgcgcaatactgtattacgactctcacctatttctttctcacatggtttccggtatatttggttcaggcccgcggcatgtctattcttgaagctgggtttgtcgcttccctgccggcgctgtgcggatttgccggcggcgtccttgggggcattgtgtcagacatcttactcaaaaaaggccgttcactgacctttgcaagaaaagtgccaatcattgccggcatgctgctgtcttgcagtatgattgtctgtaactacacagattcagcatggctcgtcgttgtcattatgtcgctcgcgtttttcggaaaaggcttcggcgcattgggttgggctgtcgtgtcggacacgtctccgaaagaatgtgcaggattaagcggcggtttgttcaacactttcggcaatattgcctcgattacaacaccgattattatcggatacattgttaatgccactggatcttttaatggcgcgcttgtgtttgtcggcgctaacgcgattgcggcgatcctcagctatttgctgctggtcgggccgatcaaacgggtcgtgttaaagaaacaagaacaagaccccgatcaatcgttgcctgtctaatatttatgaaagcgctttataaagggaggaaaatgcatgagttcaccgatacaagagcaggttcaaaaagagaaaagatcgaatattccctcaattactgaaatgaaggtgattcctgttgcgggacatgacagcatgctgctgaatctaagcggagcacacagcccgttttttacccggaatatcgtaatcttaacggacagcagcggaaatcagggagtcggcgaggtgcctggcggagagcatattcggcgcacactggagctgtcagagccgcttgttgtcggaaaatctatcggtgcgtaccaagcgatattgcaaacggtcagaaagcagtttggcgatcaggacaggggagggcgaggaaaccagacgtttgatttgcgcaccactgtgcacgccgtcaccgcactggaagcggctttgttagatttgcttggaaagtttcttcaggaaccggtcgcggctttactgggcgaagggaagcagcgtgatgaagtaaaaatgctcggttacctcttttacatcggcgaccgaaagcggacgaccttgccgtatcaaagcgatgagcagtcagattgtgcgtggttccgtctgcgccatgaggaagcgctgacgccggaggccattgtgcgtcttgccgaatccgcacaagagcgctatggctttcaggatttcaagttgaaaggcggggtgctgcggggagaagaggaaatcgaagctgttaccgcattatcgaaacgttttccagaggcaaggatcactcttgatccgaacggggcatggtcattagaggaagctattgcattatgcaaaggaaagcaagatgtgctcgcgtatgcggaagatccgtgcggggatgagaatggctactccgctcgtgaagtaatggctgaattccgccgcgcgacagggcttccgactgcgacaaatatgattgcgactgactggcgggaaatgggtcacgcgattcagctccatgcggtcgatataccgctggctgatccgcatttttggacgatgcaagggtcggtgcgggttgcgcaaatgtgcaatgattggggtttgacatggggctcgcactccaacaaccactttgatatttcccttgcgatgtttacccatgtggcagcagcggctccggggcggatcacggcgattgatacccattggatctggcaggacgggcagcaattaacgaaacagccttttgagatttcttctggctgtgtcaaggtgccggataagcctggactaggcgtcgatattgatatggaacaagtggaaaaagcgcatgagatctaccggaaaatgaatttaggcgcacggaatgacgcgatcccaatgcagttcctgatccgcaactgggaatttgaccggaagcgcccgtgtcttgtgcgataagtttgtttgtaaatattgtcatatccgctattttgtcttacaattgaacaactgaagggagagttgttcgtgtacgaaggtttagaggatttgaaagtcgatacagtcaatcggaaaacattagccaagcaggtcatcgaacggattgtccatttattatcgagcggacagttgagggctggagacaaattgccgacagaaatggaactgatggacattttgcatgtcagcaggccggtgctacgggaagcactcagttcacttgaaacgctgggcgtcattacgagaaaaacacgagggggcacatatttcaacgataaaatcggcatgcagccattttccgtcatgcttgctttggccactgataatcttccggctatcattgaagcgcggatggcgctagaactcggactcgtgacaattgccgcggaaaaaatcaatgaggaagagcttcagcgtttgcagaagacgatcgacgatattgccaacagcactgacaatcattatggtgaagcggataaagagttccatcgaattattgcgttaagcgccaataaccccgtcgttgaagggatgattcagtccctgctgattacccatgcgaaaattgacagccaaattccgtacagggagagagatgtaacggtcgaatatcacaaaaaaatctacgacgcccttgccaaaagagatccgtacaaagcacattaccacatgtatgaacatctgaaatttgtccgtgacaaaattctaaaaggaatggatgaaaaataatggtgagcaaccgcagttgaaacgtaagagctgcggtttttttaaaaccaatttagaaaacgcttactaagttatgaggagtgattttcatatggcgatgaacctcaggaagaaccaagcgcccctttacatcaaagtgcatgaaatagataacaccgcgattattgtaaatgatggaggactgccaaagggcactgttttctcatgcggactcgtacttgaagaggatgttcctcaaggccataaggtggccctcaccgatctcaatcaaggggacgagatcgtgcgttacggagaggtgatcggatttgctgatgagacgatcaaacgcgggagctggatacgggaagacctcgtgagaatgcccgctcctccggcgttagacgatcttcctctcgcaaacagggtgccgcagccgcggccccttcttgaaggctacacgtttgaaggataccgaaatgcggatggcagtgcggggacaaaaaatatcctcggtatcacgacaagtgttcaatgtgttgttggcgttttggattatgcagtcaaacgaataaaagaagagctgctgccgaaatacccaaatgtcgatgacgttgtgccgctgcatcatcaatacggatgcggcgtggcgatcaatgcgcccgacgctgtcattccgatccgcacgattcaaaatcttgcgaagcatccgaacttcggcggagaagtaatggtcatcggattgggatgtgaaaagctcctcccggaaagaattgcctccgaaaatgatgatgacattctatcgcttcaggatcaccgaggttttgcggcgatgatccaatccattttggaaatggcggaggaacggttaatcaggctgaacagcagaacccgggtgtcatgccctgtttcggatctggttatcggcctgcaatgcggcggcagtgatgcgttttccggcgtgacggcgaaccctgccgtggggtatgcggctgatttattggttcgcgcaggtgcaacggttttgttttctgaagtgacagaggtgcgggatgccattcatttattaacgccgcgggctgtcagtgaagaggtcggacaatcactgatcaaagagatgaagtggtatgacagctatcttcggcggggagacgcagaccgaagcgcaaacccgtcaccaggcaataaaaaaggcggattatccaatgtggtggaaaaagcgttaggctcggtagcgaaatcaggcacaagccccatctccggcgtgctcggccctggtgaaagagcagagcaaaaaggcctgctgttcgcggcgacaccggcaagcgattttgtgtgcggcaccctgcagctggctgcgggcatgaatctgcaggtgtttacgacaggaaggggaacaccatacggcctggctgctgcgccggtgctgaaagtatcgacgcggcattccttatcagaacattgggctgatttaatcgatatcaatgccggccaaatcgcgacaggagaggccagtatcgaagacgtaggctgggaaatcttcagaacgattttggatgtggcaagcggccgaaaacaaacgtgggcagaccgttggggccttcataatgatttgtgcttgtttaatcctgctccagtgacttgattcatttttttatagcgattagatggaatatgatgtaaaatacaattaacgtataggaaacggaggggttacagcatggcattcattagattccgagtgacacgaattcaatagtgagcaactctcgcctgaatgcgggagaatcgggatgaatccgcctatgtatgagcccttatatggttattaaaaaagagggtggcgatgcctgccttcttttttctgcctccaaacatcccctctctctccttcagggcggagcatgagaaaggggaaatgggatgacaaaccttaccgaaaaacagatgatcacggagattgtcgggcttgcacgcagccaaggtttgacggttcattctgaggacgcgcaattgaatgaaaccggaatggactttcaagttgtatttgccaaggacgacacaggtatgccatgggtgctgcgaaaaccgcggcgaagtgatgttgtggaaagagcatctgcagaaggcataacgcttgcctttctccgcgcgaatctgactgctgatgtgccggattggagaattcacacgccggaattgatcgcttacccaatgttaaaaggaacgccggcggccgggattgatttggaacaaaagcaatatgtttggaatatgaatcatcagccgccatcagacgattttgtccgtacacttgctggcatactggctgaattacatggcacggatcaaatatctgctgggcaatccggaatagaagtgataaggccagaagatttcaggcaaatgacagcagactctatggttgatgtgaagaataagcttggcgtatctacgacgctttgggaaagatggcaaaagtggatagatgatgatgcatactggccgggtttctcttctttgatacacggcgatctccacccgccgcatatccttatcgatcaaaatggacgtgtcacaggacttctggattggacagaagcgaaggttgctgacccagccaaggattttgttctttatcaaaccattttcggagaaaaagaaactgcccgtttgcttgaatactatgatcaagcaggcggccgaatatgggcaaaaatgcaggaacacatttcagagatgcaggcggcgtatccggtggaaatcgccaagctagctctgcaaacacagcaggaggaacacatcaatatggcgctggaagcacttggtgtaacatcggattaagaattgacttcgtttcatgaaccgagtattataaactctacaaataatagaacggattaacaatcgtgaggaagagcaagtacgcatcagaatggaggttcagagagtcggtggcaggtgtgaaccgatcctcccctgatgccgaatgggcttctgaattgctttgctgaacggatagtaggcgatgccgggtttctctccccgttaccaagagaggagtatcgaaacataggttttctgtacttagagtgaacggctgtatagctgttaataaaggtggtaccgcgagaccctcgtcctttgcataggacgggggttttttgtgtttcttaaaggaggtgacggccaatggacgatggctggtggtggcatagcagatgagttagaaaggaggatatcaaatggtcattgcaactgatgatcttgaggtcgcatgtcctaaatgtgaaagagcgggagaaatcgaaggaacaccttgcccggcctgcagcggaaaaggtgttattctgactgctcaaggatatacgcttctggattttatccaaaagcatttgaataagtaaaggagaaaagctgagctgagatgagagcagaagagcagagtaagattcgtgaggccgcagcaggtacgatttttttgctgatcggaacagtttgttttgcgtctaaatcgatttggataaaatgggcataccaaatgggtgctgagccagatgccgtgctgctatataggcagctgctggctgttccgctgttttggctgatttttttaatatatcgtcctccaatgccagacggtaagaaaaaaggagacctatggaaggcttgtggcgcgggagtgttttgtttttttctgtctcccttgcttgattttatcgggctgaaccatgtatccgcaatggttgaacgtatattgctgatgagctatccgttgtttgtgtttggattcaccgcgtgtcgtgaccggaaaatgtcctcaattcaggaccttttcgcagttctggcggtcatgtttgggcttttcttggcgctgggcggctggaatgctgagcttttccaggcgaatatgattggagctgtattcattttgttatcttcggccgtctatgctggttatcttgtcctttccgggcatctcgtccatcaaatcggggggatccgtctcaatgcatacgggatgacagctgctggagctgccatgatgctttacacagggatcaaatcggcggctggcatgaatacgccaatggcagcatatccgctttctatgtatggtttgttcgcggtaattgcagtcgttaccacagtgattccatttgtgctaatgcttgagggcataaaacgaatcggggcacagcgagccgccgccatttcaatggcagggcctatcctgacgattttctatggagctttatttctcggtgaacggctcgggctcattcaagtcattggatgcggtgccgtattttttgtcattacggtgatggaatacaggaagctgaaaacaggaaaataagaataatttatataaaacacacacgtttttcaattacaataagtgtaattacgtgtgtgttttttgattttgtaaaggttaggtgagaagatgcagcgcatattgcttgtagaagacgaccactcaatcagtgaaatggtggatcattatttaacaaaagaaggctttggaattgtgcatgctttcgacggagaagagggcatccggctgtttcagcagggttcatacgatttggtcctccttgatatcatgctcccgaagctgaacggcatggattttctgaaaatcatccgggaaaaaagcaatataccggtcttaatgatttcggcaaaagacggagatgtggacaaggcattgggactgggttttggggcggatgatatcgccaaaccgttttcgatgattgagctgacagccagagtaaaagccgcgatacggcgggcgacgcaatattcggcagaggagccggctgtgaataaggtgatccggattcaccagcttgcgatagatatagacaatgtttccgttttgaaaaacggagagccgctccagctgacgtcaacagaatggcagctgctgtgcttatttgcatcaaatcctaaaaaagtgtttacgaaagaacaaatctaccgttccgtttggaatgaagagtactttgatgatcagaacatcattaacgtacatatgcggcggctcagagaaaagattgaggatgacccctcctcccctcaatatattaaaacgctatggggcatcggttataaattaggagagttttagaatgacagtgctatgggtggccgctgtcatcgctctggcgtgtctgaatgtgattcaattcataatgaaaaagaagcgggacgggaatctggcttacacggctgaccagcttagctacatgctcagccgggattcggcaggacaaattttgcttcctacagacgatcatgcgctcaaaggcttgcttgttaacatcaatcttatcgttgagaatcgtcagcagatcagcgctcgatttgccaaaacagagcaatccatgaagcggatgctgaccaatatgtcgcacgacctgaaaacgccgttaacggtcattctcggttatatcgaagccattcaaagtgacccgaacatgccggacgaagagcgggaaagattgctggggaagctccgccagaaaacaaatgaactcattcagatgatcaactccttttttgatttagcgaaattagaatctgaagataaagagatcccgattaccaaagtacatatgaacgacatatgcaaacgaaatatcctgcactattatgacgctgttcagtcaaaaggctttcaagcagccatcgatataccggatacgccggtgtatgcgcaggcgaatgaagaggcactggacagaatcctacaaaacctattatccaatgcgattcaatatggcgcggttggcaagttaatcggcatgacgctgtcttatgatgagaggaacatcgccatcaccgtatgggatcgcggaaaagggattagtgaaaccgatcagcagcgggtgtttgagaggctgtacacacttgaagaatccagaaataaagcatttcaaggaagcggcctgggtttaaccatcacaaaacggcttacagaaaaaatgggaggcaccatatccgtccaaagcaagccgtacgaacggactgcatttacgatcacattgaaacgcatgacatattaatcgtaagaatttcttaaggtttgagaaataaaaatgacagggctcgccgctacaatagaaaacaggaaaagagagggaaggagaaacaaagttgacttatatcgtacaaacaaacgggctgaccaaaacgtatcagggcaaagaggtcgtatccaatgtcagcatgcatattaaaaaaggtgaaatctacggctttctcggcccgaacggcgcggggaaaacaaccattatgaaaatgctaacgagccttgtcaaaccgacaagcggtgaaatcatcatccttgggaacaagttcacccacacgtcatatgaggtgctggggaacatcggcagcatgattgaatatccgattttttatgaaaacctgacagctgaagaaaatttagatctgcattgtgaatatatgggataccacaataaaaaagccatacaagaagtgctggatatggtgaatttaaaacaaatcgacaaaaaacccgtcaaaaccttttccctcgggatgaagcagcgccttggaattgcgcgtgccatcctcacgaagccggacctgctcattctggatgagccggtgaatggtcttgaccctatcggcattaaaaagatcaggcaattgtttcaagtgctgagcaaagagtacgggatgacgctgctgatctcaagccacctgctgggtgaaatcgaacaaatcgcggacacaatcggcgtcattcgggacggcaggctgcttgaagaggtatcaatggaggatgtcaggggccagaacactgaatacatcgagcttgttacgccgaatcagacaagggcctgctttgtgctggagaaagagctgcaattaaccaactttaaaattttaaatgagaaaacaatccgaatttacgaggctgaagcctctcaggctgccatatccaaagcattgattttaaatgatgtagacattgaatcaatgaacaaaaagtatacgtcgctggaggattattttatcaaattgatcaacggcaatagcatcagtgcgtaaaggaggagagacacgttgatgaatttgatcagaatcgaattaagaaaaatgaaaatgggctggtatatgagaggtgccctcattgccaacgtgatcattatgggttttatgtggctgatcagttattccgaaaaagccgatggcggggtttcgttccaaagtacggatgaagcattcctcatcatcggcaccttcgtcagagcggtatttatcgtatttggcgctgtgctgatcgtaaaattggtgatttcggaatataaaaacaaaaccattcttgtgatgttcacgtacccgatcagccgtaaaaagctgctcaccgctaagctcatgatcgcgggcggactgacgtttatcacgattttactttcaaatatactcatagccgccggtttcttttggctgaactcgatctgccatttcataccgggagagcttacttccgagatcatttctcaacaggcggtcaaaatggcggttttcgcttttggcgccgctggaaccagtttagttcccatcttttttgggatgcgtagacactcggttccggcgaccatcatttcatctgtagtaattgtgatgctcatcagctcaacaagtccgggcttctcgatttcatctgttgtgtatatcccgttatcgttagcggcattcggattgttcttttcctacatggcgatcaggaatgcggacaagcaggatgcgtaaacaaaagcgcccaatatgtataaaaggccgatgctgtcagcatcggcctttccattatgagtctgttcttgtttcaagataatgcttcttgccaatctctttgctcatcatatagaaatggaagcaatattcaccgattgccatgacgatcgcgccgaataaagccgccaacgcaacttcaccgccagtcatccctagggaaagcggcatgcccatcagccagatcacaagaaaggccaagccaaaatcagccaaagttgcaatcatattattccatctcggcaatacataaagatcgcccagcaaataagaaataacccctaacacaatcgtcattagcagcgtatcaccaaacgtgaaaccaaagcccagaccaagcaccagatacaacacaataatcgtcataatacctttaatcgcgagcgctttcacatgtgtcattacaattcctccttttgtcatttgatttgttatgtataattcctcaaatgtaaaaagttaaaccttatttcttttcggaggcgggtgcaaatctgctggggaggggtcaatgatgtgaatccaggaattgaggctgcggcgcttcgacagcggaaacgtgaagcttgtactgcaccggacgctgctttgatgcccaacagcccattatgtttgctgtttttagatgaataaatttaaaaacttctcctgtccctccgtcatcacttctgaagtaatgaaatatgatgaaaagagatcaaggggaggtgacgtgatggcggtcgtgagagcaacgagtgcggatgtcgatttgatggcaaggctgctcagagcggaagcggaaggcgaaggcaagcaggggatgctgcttgtcggcaacgttggaattaatcggctgcgggcgaattgctcagattttaaaggcctccgcaccatcaggcagatgatttatcagccacacgcgtttgaggctgtgactcatggatatttttatcaaagggcgcgagatagcgagcgtgcccttgcacgccggtcgattaatggtgaaaggcgctggccggcaaaatttagtttgtggtacttcaggccggagggagactgtccagcccagtggtataaccagccgtttgtggccagatttaagtcacactgcttttatcagccgacggcggagacgtgtgaaaatgtatataacacattttagagacaggacaccgttcaaattgaacggtgtttttatttgaaaagatgcaatggaaaatattcctgtgagataatcgaagaaaaaagagctgacggagatgacagaatggcaacaattgacctgcaaaagaaaagtgtaaagatcgtactggagaaaaagcagttaacgaaggtgacggctcgtgtcggactggttcttgatattacgggatcgatgagaccgctctacaaaaacgggacggttcaaaatgtggtggagcggattttggcagtggctgatcagtttgatgataacggtttgctggatgtatgggtgtatgataatgaattttcccgattaaagccagtttcagaaaaggatttttcgggctatgtcgatcgtgaaattttaaataatgaccgcttgcataaattcggcagaaatgatgagtcgccagtcatgaaggacgtgctgcgcaaatatgttacggaggaaccgagctcgtatcctgctttcattgtttttatcaatgacgggggctgtaaaaagtcaatcaaaccgataattgaagcttcttctgataaaccggtgttctggcagtttgtcggcatcggaaacggaaactttgattttctcaataaactggatacgttagaagggcgtgtcattgataacacgaacttcctgcatatcgaagagattgaccgcatttctgatgatgagctttatgatgctctgcttgctgaatttccattttggctgaaagaagcgaaggaaaaagggattgtaagagaacaagagcctcctgctgaaaagccgaaaaagaagggctttttcagcagattgttttcgaaataactgataaggcactgagccattctgcgaaatggctcggtgtttttgtttttttaagatcatgtgaagaaaaatagtccaaatgggcggcttgcaaacgacaggatatgcagaaaacgcgtcattcagccagctttcggcatgttttagcggcaggcttgtgagggaagacctgtttttgatgttcagcgcttacaatcagttcacacttcttcacagtcgtttaacaatgatttcctataatggagacgatcaatgaggagagaggggatcttgaatggcatacgacagtcgttttgatgaatgggtacagaaactgaaagaggaaagctttcaaaacaatacgtttgaccgccgtaaatttattcaaggagcggggaagattgcaggactttctcttggattaacgattgcccagtcggttggggcctttgaagtaaatgctgcgcctaaattctcaagctatccgtttacattaggggtagcgtcaggtgatccgctttctgacagtgtcgtgctctggacgcgcctggcacctgatccgctgaatggcgggggaatgccgaagcaagcagtgcctgtcaaatgggaggtcgcaaaggatgagcatttccgcaaaatcgtaagaaaaggcactgaaatggctaaaccgagtcttgcccattccgttcatgtggaagcggacgggcttgagccaaacaaagtgtactattaccgtttcaaaaccggccatgaactaagccctgtcggaaaaacaaaaacactgcctgcccctggcgccaatgtgccgcaaatgacctttgcatttgcttcctgccagcaatatgagcacggatattatacggcctacaagcatatggcaaaggaaaagcttgatcttgtcttccatctcggtgattacatatatgaatacggcccaaatgaatatgtatcaaaaacaggcaatgtccgcacgcacaacagcgcggaaatcattacgctgcaagactatcggaaccgtcacgctcaataccgttctgacgccaatcttaaagctgcacatgcggcattcccttgggttgtaacttgggatgaccatgaagttgaaaacaactatgccaataaaatacctgaaaaaggacagtcggttgaagcattcgtgctccgccgcgcggcagcataccaggcatactatgaacatatgccgctccgcatttcctctttgccgaatggcccagatatgcagctgtaccggcactttacgtacggaaacctggcgtccttcaatgtgcttgatacccgccagtacagggacgaccaagccaataacgacggcaataagccgccttctgatgaatcgcgcaatccgaatcggaccctgcttggaaaagaacaggagcagtggctcttcaacaatttgggcagctcgactgcccactggaatgtgctggcgcagcagattttctttgccaagtggaatttcgggacaagcgcaagcccgatctacagcatggattcgtgggacggctacccggctcagcgcgaacgggtgatcaatttcattaaaagcaaaaatctgaataatgttgtcgtactgacaggtgatgtacacgcaagctgggcatcgaatttgcatgtcgatttcgagaagacaagttcaaaaatattcggagccgaatttgtcggaacctcgatcacatccggaggaaacggcgccgataagcgggcggatacggaccaaattttaaaagaaaatccgcacatcaagttctttaacgactatcgcggatatgtccgctgtacagtgacgcctcaccagtggaaagccgattatcgggtgatgccgtttgtgaccgagccgggcgcagccatttccacgcgggcttcattcgtttaccagaaagaccaaactgggttgagaaaggtatcatccacaacaatccaaggcggggtgaagcaatccgatgaggtcgaagaggatcgtttctttgcgcacaacaaagcccacgaaaaacaaatgattaagaagcgggcaaaaatcacgaattaaggagtggaaattatgttttcaaacattggaataccgggcttgattctgatcttcgtcatcgccctcattatttttggcccttccaagctgccggaaatcgggcgtgccgccggacggacactgctggaatttaaaagcgccacaaaatcacttgtgtctggtgatgaaaaagaagagaaatcagctgagctgacagcggtaaagcaggacaaaaacgcgggctgaatgctgatgaggcagacaccgggtctgcctctttttttatgaaagggagggcttttttgaatggataaaaaagaaacccatttgatcgggcatttagaagagcttcgccgccggattatcgtaaccctcgcggcattttttctatttctcatcacggcttttttgttcgtacaggacatttatgactggctaatcagggatttggatggaaagctggctgtgcttgggccgagtgaaatcctctgggtgtatatgatgctttccggcatttgtgccattgcggcttctatccctgttgccgcgtaccagctgtggcgtttcgttgcaccggcgctgacgaaaacggagcgcaaggtgacgctcatgtacataccaggtttatttgcgttgtttttggcgggcatctccttcggatactttgtcttgtttccgatcgtgctcagctttttgactcatttatcctccggccactttgaaacgatgtttacggctgaccgctactttcggtttatggtgaatttgagcctgccgttcggcttcttgtttgagatgcccttggtggtgatgtttttaacaaggctgggcatcttaaatccttacagactggccaaagcgagaaagctgtcctattttctgctgattgtcgtatctatattgattacaccgcctgattttatttctgattttctcgtgatgatcccgcttcttgtcctgtttgaagtgagtgtcaccctatcggcgtttgtctacaaaaagaggctgagggaagaaacagcggcggccgcttagtgcagcgtaccgcccggtgacttcacatcctcatcatattgtgcggccgtaacagcggcgattctcaatgcccggacaatcgtgtccaggctgaggctcggcgctgttttgtcgattgtttgctgcggaatgtaaggaatatgaataaaaccgccgcgaatgtgcggggatgtccggctaatgtgatccattaacccgtagaacaaatagttgcatacaaaggtccccgctgtgtaggaaaccgcagctggaatgccgtgttccttcatcttagcagttattcgtttcacgggaagccctgtccagtaagcggcgggcccatctggagaaatctcttcatcaatcggctgatgtccttcgttatcggggattcgcgcatctgcaaggttgatcgccacccgttccggtgtaatctgcatccgtcctcctgcttggccgacacaaatcacgatatctggctgatgtgtttgaatggcttggcgcagagtgcccagagcggatctaaagacggttggaatttgttccgctgtaataatggcttcttccgtctcgaagccattaagccgtttcgccgcttcccatgatggattgacggtttctttgtcaaaagggtcaaaaccagtgatcagcactttttttctcatcttctcatctcctttttcttttattctattgtttatttatgggtttttcatcaaaataatgtaaaggagtgaatcataatggagcatttaccgcagcagtatcgtcatttattcccaaccttgcagacgcatacgatgcttgccagctgttctcagagcgcattggcagagcctgtatcaagggcgatccaggattatcatgacagcctgctgtataaagggacgaactggaaagaagcgattgaaaaaacagagtttgcgagaaacgagtttgcaaagctgatcggggctgaaccggatgaagtggcgattgtgccgtcagtttctgatgcactggtttctgtagcatcgtccttaactgcatttggaaagaagcacgttgtatatacagatatggattttccggcggtgcctcatgtttggcaggcacactccgattataccgtatccgtcattccatcaatagacggcgtgctgccgcttgaacaatatgaaacgcatatttcggatgaaacagtactgacgtgtgttcctcacgttcattatcgtgacggctatgttcaggatataaaagcgattgccgagatttctcagagaaagggctctttattgtttgtagatgcttatcaatcagccgggcatattcccattgatgtgaaggaatggggcgtagatatgctggcagcaggcacccggaagtatttgctcggcataccgggtgtggcgtttctttatgtgagaaaggagctggctgacgcactgaaaccgaaagcatcagcttggttcggcagagagaacggatttgatggggcttatgcgaaaggcgcgcgtcgttttcaaacgggcaccccagcttttatcagcgtatacgcagctgcagcggctttatcgctgctgaatcatattggggtttctcatatcagggatcatgtgaaaacgatctgtgccgatgcagttcaatatgccgctgaaaaaggcctgcagctggcggcggcacaaggtgggggtcagccgggcatggttgcgatccgggatgagcgggcatcggaaacggcggcgttgctgaagaagaaaaaagtgatttgcgcgccgcgggaaaatgtgatccgtctcgctccccatttttataatacgaaggaggaaatgcggcgcgcgattgatgaaatcgcggcgaaaacgatccacaagtaaacataaaaaaagcccctgaacattagtcaggggcttttcatattaatgatctaccttcacgcgcttcataaagaaagcgccaattaaaccgataatggcaacaatcattgcaaacacaaatgcgtgctgtacacccgctgtcaaagcttgcgggatgactgccggatcggcagggtttttaactgtactcatataatcatgctggcctgcagccataatgctgaccgcaaccgctgttccgatagcgccagccatttgctgcagcgtgttcataatggcggtgccgtctggataaaattcgcgcggcagttggtttaaaccgtttgtctgtgcaggcatcatgatcatagaaatcccgatcatcaagcaggtgtgcaggatgataatcagcacagctgttgaagtggtcgtgacatttgagaagaaccatagtacaacggtgacaatcacaaatcccggaatgacaagccatttcggcccgtatttatcgaacaagcggcctgtaacaggggacataaatccatttaaaataccgcccggcaagagaacaagaccagatgcaaatgcagtgaggactaagccgccttgcagatacatcggcagaagcagcatagatgacagaatgaccatcatacaaatgaacaccatgatcacacccaaaataaacatcgggtatttgaacgcacggaggttcatcatcggctgcttcattgtcagctggcggattgaaaataggataaggccgacaacgccgacaatcagcgacacgataacagtcgggctggaccatcccccggagccttcacccgcgttgctgaatccgaacacaatgccgccgaagccaatcgtcgacaggatgatagacaatacatcgattttcggctttgtcgtttcagatacattctgcatatatgcgataccgaaaacaagcgccagcacaaggaatggaagagagatccagaaaatccagtgccagttgagatgctccagaaccaatcctgagaaagtcgggccgatggcgggcgcgaacataatgacaagcccgatcgttcccattgcggcgccccgtttatgaggcgggaaaatcaccaagattgtgttaaacatcagcggcagtaaaagaccggttccaagtgcctgaacgatccttgccgccaataaaaacgggaagcttggcgcgagtgccgcgatcaaggttcctataattgaaaagattagtgacacggtaaaaagctgtcttgttgtgaaccactgcaacagcagtcctgaaacaggaacaaggataccgagtacaagcaggtagcccgtcgttaaccattggacggttgccgctgtaatgttcaattccttcataaggtcggttaacgcaatattcagtgctgtttcactgaacatgccgataaaaccggccaacagcaaggaaatcataatcggcatcactttgtattgctgagatgctttagctgttgtttccaaaatcatttcccctctctatcaactgcatgtagtatgtcgtttttttatctcttcagcaggtcaggaatgcagctggagatatgaaggagcggcgtactgttttttgccgtcaaagataaaagaatgccgccttcaatcatcgcgttaaccacagtgctggcttcttttgcacggttctcgctgcagccagtctgccgcagtttttcctcatatacagaggcccattctttgtaggcttcatgacaggcttcgcgcaacggttcgcttttcaatgacgtctcagccgctagcaagcccacaggcaagccttcaatgtcttccgtacatgaaaactggcaggagagctccttcaaaaaggcttgaatgccttccgctggatcggtgcaggcttccatgcagtccgcgattttctgacggatatactccttcatctcattcacggcttcgatcgcaagctgttctttacccccgggaaagtggtagtaaagagagcctttaggcgcgccgctttcctttataatctggttcagccccgtgccgtaatacccttgcagctgaaaaagccgggtagctgccgaaaggattttctcacgggaatctccataactcataacattcccaccttactgaattgcaatcaaaaatatagtgactggtctattatcttgattcaatcatcaattgtcaagaaaaattcattgtatgaaaagacaaaaaaagaaggatatgacaacaaaaaatactgagagaaaagctgactgatcttttgactgaatagataaaatgtacaatgattaatcatcatatggatgtaaggagagaaatagatgaaaaaacaacgaatgctcgtactttttaccgcactattgtttgtttttaccggatgttcacattctcctgaaacaaaagaatccccgaaagaaaaaacgcagacacaaaaagtctcttcggcttctgcctctgaaaaaaaggatctgccaaacattaaaattttagcgacaggaggcacgatagctggtgccgatcaatcgaaaacctcaacaactgaatataaagcaggtgttgtcggcgttgaatcactgatcgaggcagttccagaaatgaaggacattgcaaacgtcagcggcgagcagattgttaacgtcggcagcacaaatattgataataaaatattgctgaagctggcgaaacgcatcaacgacttgctcgcttcagatgatgtagacggaatcgtcgtgactcatggaacagatacattggaggaaaccgcttattttttgaatcttaccgtgaaaagtgataaaccggttgttattgtcggttcgatgagaccttccacagccatcagcgctgatgggccttctaacctgtacaatgcagtgaaagtggcaggtgcccctgaggcaaaagggaaagggacgcttgttgttcttaacgaccggattgcctcagcccgatatgtcaccaaaacaaacacaaccacaacagatacatttaaatcagaagaaatgggcttcgtcggaacaattgcagatgatatctattttaataatgagattactcgtaagcatacgaaggacacggatttctcggtttctaatcttgatgagctgccgcaggttgacattatctatggataccaaaatgacggaagctacctgtttgacgctgctgtaaaagccggagcaaaggggattgtatttgccggttctgggaacgggtctttatctgacgcagccgaaaaaggggcggacagcgcagtcaaaaaaggcgtcacagtggtgcgctctacccgcacgggaaatggtgtcgtcacaccaaaccaagactatgcggaaaaggacctgctggcatcgaactctttaaacccccaaaaagcacggatgttgctgatgcttgcgcttaccaaaacaaatgatcctcaaaaaatccaagcttatttcaatgagtattgaagaaaagaaggcgaataagccttctttttttggctttttaggaccaataatgacctctgaatcttaaaatttctttaaaaataagccaaaattaccctttacttaattaatttggtaacgtaatataattgaagaatttgttacaaaaaaaggaggatattatgaaatttgtaaaaagaaggatcattgcacttgtaacaattttgatgctgtctgttacatcgctgtttgcgttgcagccgtcagtaaaagccgctgaacacaatccagtcgttatggttcacggcattggaggggcatcattcaattttgcgggaattaagagctatctcgtatctcagggctggtcgcgggacaagctgtatgcagttgatttttgggacaagacaggcacaaattataacaatggcccggtattatcacgatttgtgcaaaaggttttagatgaaacgggtgcgaaaaaagtggatattgtcgctcacagtatggggggcgcgaacacactttactacataaaaaatctggacggcggaaataaagttgaaaacgtcgtgacgcttggcggcgccaaccgtttgacgacaggcaaggcgcttccgggaacagatccaaatcaaaagattttatacacatccatttacagcagtgccgatatgattgtcatgaattatttatcaagattagacggtgctagaaacgttcaaatccatggcgttggacacatcggccttctgtacagcagccaagtcaacagcctgattaaagaagggctgaacggcgggggccagaatacaaactaatgagataaataaccttgaagagtcctattcttcaaggttattctgctttcagcacaatggttttcgccgccatatcatgaacggtttgttttttcttcgtaaatgcggctgtcaaatagatcaggcgggagaatacatgcacccacgctatgatgtaacggacaatcgcctgtaggaaagaaattttctcgtgtgtttcgtccctcacgatttgcagcccgatgatttttttgcccagtgtgcccttccaatttgtcagcggcatcagcaaaggatacacaatcagcatcaatatggcgacaataatgacaccagcggacccatcgccaaacgtaaatccggctgccaaaatcactgctgcggcaatgattacatcaagtaaaagagcgcaggcgcgcagcatgaaaccagctagttccaatagaaacactccttaaaatgttaaataaacacctaatgattgtaaaaaagaagggcctaaagtgggaataggtgataagccttaaatcacaaaagttggtgaaaatgtcataggtaaattggcataatcagccagcttatcacattaccaaattcttttttagcccgaaaccaagccctcagaagttatttttgttaaaatagaaaagttacaacagaattcggagggtttattgtgggaaaagtgaaacgaaatgccccttgcccatgcggcagcggcaagaaatataaaaaatgctgcggaagtaaagttgtcgacttcccggcggaactagcggcaaaagaagcgaaacaaattcaggaagacttagtggagtatgccttcacagtacatagagaaagcatttcaggctttatcaaccagcatgattttctttctgctatggacagacagacgaaagacatcagcgtatttaacttaggaatctggggaatcttcttccacccgcttgctggtgagaagacaatcttcgaagagtaccttcagaaaaaaggcgattcgatcactcgtccgaaaacgcgtgagatcgtagaatcatggcagagcatgacgcctgctttattgctgctgaaggacctgaaggaaggcatcattcactttgaagatgtcattacggcaaaacaattcgaagtggaaatggacgccagcaatcaagaccttcctccagtgggaagcctgattcttggatacccaatccacgaagcggaaaaagcagaattcttcatgcagttcacgatcttcccggtgaagagaacagaagcgctgatcagcaaggtgaagaaatatgcggatgccgctgtgaaggacggcaaaacgccggaggacttcatgaagcaggaattcaacaacgttctgttcgcgttgttagctgagaaagatgaagagccacaagcagagaaagcggaagtaagcactgttgagtgggcaaacgacttggagaaagaaaccgctgcggctattgaagaaggcatgagcggggaagagtatccgactgaattgatcccagctgttattgacatctggaaaacattctgcgagaaaaaatcacctgtcatcagaaagccggaagcttttgcggcggcagttgaatattatgtaaacgcaatttctcttaacggcgcgtccgtttcccaggctaaactggcgaaaaaatacggcgttagcgcatcaacgatttccagccgttacaaagaaattgaaagcacgctgcaagatgaagcagatcgttttgcacaagcgttatcctcataatggaaaaaaccttgaaaagccaggcttttcaaggtttttttatttctgaaacggaattttgatttctaaccggaagacggggtggcggtaggtaaaatccagcctgccaaaagcgctcttcaccagtttttgaatgatatatgtgcccatgccttcatgagcgccgtttttcgttgagcggccaaacgattgataaattgtatcgagcacttttgggtccatcccgggagtgctgttttcacaagtcagtacataaagtccgctgcgcagtgaagtttccagtttaatctctgctttttctcgggcctccgctgcgctgtcgagcgcattttctaatatgttgccgaccaagctgacctgatcagcaggcgaaaacggaagggaagaaagcggtgtatgcatatgcagcgaaacactcacattcgaggcgcgggctttttctaaaaaatcataaagcacccctgcaacgtacgcgttctctcctttcaaaaaacggtcatattggctgtattgatccgcccagttttgaatatatgcttgtgtatctgccttgggctgagctgatttgattgcagtgatatgtttcattgtgtcatgattctggcttctgacatcaatcagcatttgattggcgtgctgttcagcttgagtcagcttatcaatttgatcagaaagccttgcctgcaaagcagactgtccgatacggagcccttcacaccctgcaaatatcgcgattacacataataccggcatgatgtctgtgccaatcaacactactcccgccgacatcacttgaatcacagcaatccacgcacaaagccctgaggaacagtgtttccacacccgcttcgtattccaaatgtacaatcctgcagcagctgcgcctaaagcagcggcgagccaagaggcggctgtgctgtgtgaaaaagcagcagctccctgataacatatgaaactaaataaaaccagataaagacattgaaaaagggtaatcacgttctgaactcctcaaaagtagtagttttgaaaataatcaagctgctgcttggtgatcatcgcttttttagacgttccctcaaaagaaactgtaaatgaatgcttggtataagcggaaaaatgctttatgtaatgaatgttgataataaaggaacgatgcgaacgaagaaaatccttttcgggcaggtcgcctttaatatcatttaatgtttgatacgtttgcacctcttcggcggttgtcacaatcgtcgtcgaacgtcccgtccgttctgcgaaaataatatccttcttttgcaggacatgcatttcagacttttgctttatcaatatacgcccattcaaactcgtttccgttttctttttcaagtaccggtcgaaggaagcggccagacggtcggcatagtacggcttcataatataatcatggacgttcaggtcaaaggcgtgaaccgcataaccgccgtggccggtaacaaaaatcacatccacatcaagtgaatgggatttgatcaaatcagcaagctcgtagccagacatatggggcatctcgatatcggcaagcagcagatcaatgtctccgttctttacccgcctgtaggcttccttcgctgaatcggtggaaaagacaatttcgacgtcctgcattctggacacgatcgcttccagcttctctaaatctactcgataatcatctacaagtccgacttttaccattatcattcccctagttacatagaatcatctttattctatcccatttcgcgacataaaaagaactcttcgcgacaactttatccaactaatccagcttttcgtatatagtcattactagaaataaagataagggagattgtgacatgattacactgaccgattgcagccgcaggtttcaggataagaaaaaagtagtcaaagcggtgcgagatgtaagtttaacaattgaaaaaggagaagtcgtcggcattctcggagaaaacggtgccggcaaaacgacgatgctgagaatgattgcttccttgcttgaaccatcacagggtgtaatcacagtagacggctttgacacggtcaagcagccggctgaagtcaaaaaaagaatcggtgtcttattcggaggagaaaccgggctttacgacaggatgaccgctaaagaaaatctccaatacttcggcaggctgtatgggctgaaccgccacgagatcaaagcaagaatagaagatttatcgaaacggttcggcatgcgcgattatatgaaccggagagtgggcgggttttcgaaagggatgaggcagaaagtcgccattgccagagcgctgattcacgatccggacatcattttatttgatgagccgacaactgggcttgatattacgtcaagcaacatcttccgcgaatttatacagcagctgaaaagagaacaaaaaacgattcttttctccagccacattatggaggaagtgcaggcgctctgtgacagtgtcatcatgattcacagcggagaggtgatttaccgaggggcgcttgaatcactatacgagagcgagcgcagtgaggatttgaattacatctttatgtctaagcttgtcagggggatttcttaaatgctgagccatatttataaaaaagaaatgatcgacgctttgcgcgacagaaaaacgattttactcacaatcttagtgccgatgattatgatgcttggacttgtcttcttttatgaaagcatgctgtccgacaaaggggagcagtacacgctggctgtcggccattcgctgccgcccgcactggaaagcaagcttaatgagattgacgaaatcagcgtaaaaacatttgcaaagcctgaagaggcagttgatgaaggaaaagcagatgcctatctgaacgtcccaaaagagttcgactcatatgtcaacagcatgacaccttttaaggttgatgtttacggcaattcaatcgatcaagggtcgtcaaatgccatgcagcttgtgcagtctgccttagatcagtacaaaaatgaaattgtgcagcaacgtttaacaaataagcatattgatcaatcggtgatccagccgtttacaattcagcaaaaggaagcggatgaggagaaagggacttccgctattatgctttccgccattctgcccatgctgattctgacttccattgtttccggcgcaatgccgatcgctcttgatatcatggccggtgaaaaggaccgaaagtcaatcgaggcgctgctattaacgccagtcagcagaaacaaaatgctggtcggcaagtggcttgcggtttccacttttggcgtggcttcaggtgtattggctttgatgtttttgattttgtccaccgtgttatttaccgaaaatttaaaaacggccttccagctgggagatcatatgtggagtgtaatcggcgcttcagccttaatcattgtgctctctgcattgctgatatctgcgatggagcttttcatcagcatcatgtccagctcggtaaaagaagcgcaaagttatatgtctctcgtcgtctttctgcctgtgttcccgatgtttttcatcttcagcaaggcaccgaaccaatttgacttatcatactttctcatcccgtttctgaacctgcatgcgttatttaaacagcttttattcgggatggttgacccggctgccattttgtctacgtcaggaaccatcgccgtgctcatcgccatcttctttttactagccagagcctgcttcctgaaagacaaatgggttcttccaaaataaacttgcgaaaggagaaatacactttctcctttttgtatatcctgaaaaaagaaggaaaatagaaaaaggatatctaatacaaaaagtgaccctgcactatttttcatcaaaattggtttcaaaggagaaggaacaatggatcaaacacgtacactcggcaaaacgaagctgaaggtgaagcggatcggattcggcgcgaatgcggtcggcgggcataatctatttccaaatctaaatgatgaaacagggaaggatttagtgcgcacggcattggatggcggcgtcaattttatcgataccgcctttatatatggattggggagatctgaagaattaatcggcgaagtcgtacaggaacgcggcgtgcggaatgagctcatcatcgccaccaaaggagctcataaagaagtggacggcagcattgaattagacaatagccgggagtttcttcgcagcgaggtcgagaagagcctgaagcggctgaaaacagattacattgatttgtattatgttcactttccggatggaaaaacacctctcgctgaagtggcgggcactttgaaagagttgaaggatgaggggaaaatcaaagcaatcggcgcttcgaacctcgattatcagcaattgcaggattttaatgctgatggctatttggaggtcttccaggccgaatattctctcatacagcgtgatgccgagaaagagcttcttccatactgtgaaaaacaaggcatctcctttattccttactttccgcttgcgtccggactgctgacaggaaaattcacgcgagacacagtctttgatgatttcagaaaggataaacctcaatttcagggtgaaacgtttatccacaatctcaaaaaaatagataagctgaaagcagtagcggaggaaaaacaagcggatacggcacatgtcgccttggcgtggctgttaacgagaccggcgattgatgccattattccaggagctaaacgacctgagcaattacaggataacctgaaaaccttgaacattgaactcaccgaagacgaagtgaatttcatcagcgacatttttaaataaaaaggaaatagccgtcaaggctatttccttttggtgttttattctttgatgaatgcttcgactaattctgctgctctgtaatcatccatatcaagctgccattggtcgatgtcatttttcttcattttcacttcaactgttttttcagatgaagcaggtccaagctttttaaattcctcagggtagacttgaagcgcgtatttcactgcctcttcatagctggcactagagtttttactgtagtagtctttcactttgtcttcgatacggtctgaaagagaagatgcatctacaggtttaactgttgcttcaacaattgcttcgtctttagagattgaagtcgtttttgcttgaatggaagagtttttgcttaatccctctttaatgccgttcacgatattatcaagcgctttgctgtccgcatatgtgctggaaaggccggaagctgagagataaccgtctttggctgattcattgaaatcatttacaatttcatttttgttagcgccggtgattttttcgaaatcggcgttatctttgccgaaaagaaggacatcaacataagctgataacgcttttgcagaatcttggagcttatctgccgtcgccaggatttttttgtcttttccgtcaattttaaaagtaactgattttggctttttatcaccgtaagattccggcgtatagttaagctcgtattgcttgcctttatctacaacgaagaaaagatttccttcaacggatttgtcagcgttaatcgtgctgccttgaagcttttcgctatagtcttcagggtctgtgtcagacattttggtatcaccttgatacaatgtgaaatccatactgtctacattcagcgggtcttttcctgtgtttttcaccgcgacattgacttttaacacaagctggtcatctgaagtggacttatcatatttagacggaagtgtgtaagagacatccttgattttgacttgagctatatctgagcttttttctgtttctgattctttcttctccgcgcttgttttgctgccggaacaagcagctgtaaacatcatcagcagaagaattaggaaaacagcgtacgtttttttctgaaacattcatttttcctcctcaaatggtttaggaaaggggagtcttttgtctttgagaaatggatctttttgaatggattagcatcatataaccaaaaaaatcagttcttttctcacggtttttaccggattttctggaaactccgccctcctttgtcatgaatggacctataaaaagttacaacggaattaattttaagattattagcttttatattgaataggttcatcatcctatttttggtgaaaaatgttctggtaaaactggtaaactcagaaaactgtgtattttagactattactttttgattagttggagggaacttaagaaggatgaaaggggctgcctttgtgaagaaagagggactgaaacaaaaagcactggaaatcggccgggtgccgacacacttaaaactggaaattgaagattatggcggtgatgacaaaagagcctatttttgttggagagatcctcaggatgagaatatcggcattatcgtggaacttggaccggacggggagctggaatccctttcccgtgatattgagcctgaaagcggagaaaggctgtctgaggagaaactagaggatatcatgcgccaatttgtcgagactcatcatccgggggcactctctgcctttgttcgtgaagaaaatgaccgtgcatacggcgataaagtgagattttcatatgttcaaatggaggctgggcttcctctccccatgagcggatttatggctgatgtttccttatcaggtgagatcgtttacttccgctattacggcgaagcaggcagcatcatcaagccaaagagggtcgcggatgttgaagaggcacttgcctttatcaagaaggacgtagagttcgaccttttgtttgaggttctccatcgttctgtttacaaaaatggagatgatcagccacatttggtgtatgagcctgaatgtagggcgattaccgtacctgcggatttggttcaagaagaacaaggaggagttgatgatgacgataattacagggagcctgagagctttcctctccctttattcgagggcatccgcgaaaaggccgatcctgacagcatgattggtattgaaaatgggtttgtcaaagagcgggaagcggatttgggagatgggagaatcggaatcgtttggcggaatccggatgaccctgtgtatcagccggcggataaaagcatggacagctggtttaagggacggactcatcaagtgctgaaaaccatctataacaaagaaaccggaaaactcgaaggcgtcatgtcatttatggaggaaaaagggccgctgacagtaactttggcagagtgcgaaaaaattgcgcttcgctttctgtttgctttatttccgaatgccgatcaatattttaggatcagatacgatgaaaaggatgaagaagaaaacgcagtcactgtttttacatttgaaacgcattgtcacggagttccgctccgatttgggcagatcaaaatttgtgtcagccgccagacagggtatatcaccgtttatatgggaccggatattgacccaaatgagctggcaaccattgatcctgtgccggccatttcagttgaacaagccaaggctatcttttggcagcattttaaagttgagcttggctgggaaagagagtacggagatgatgaagaacacagctaccggctcgtctataagccggtgtatccgcgttttatcgatgcacatacaggagagcctgtcttcagctcatggtaaaacagccaaaagtcacgcaattgcctcaggtatagaagagagtacgtgatgaaagtaacagaaagaatctcgaaaaacaatgacaataatagaaaaggacctttcttcactttaaaagaagaaaggtctttttatataataaacaggattctctttgtcgtagactctttgaaagggatgacttcattggttaataaacagctgaaaaagatggcgcaggagatcggaaatgtaccgacgcattatgagcttgagatagaagattacgaccaaaagcaaaagaagaacgggcaggcatattttatctggaaggaccctaaagatccggaaaggcacattacagttgaacttagaaatgacggcgctttgctcaccttttcaacaactgtccgctccgagacagacaaaaaacttccagatgctgagctgaagctgacggctcttcagtttgccgctgcccatcatcccggcacatttatgaattttcattttcaaggcaaggaagaacgggggcagcacatccggtttgtctataccaaaatggagctggggcttccgattcccaattcaggctttttaattgatatgacacgcagcggtcagattgtccactttctatattacggggaagggcataaagccgaagttccgacggaatttgtagcaaaagagaaggttgtgtcccattacttaaacacaatgtcttttgagctgatgtacgatgtcattgatggcgaacaggaaccaaggcttgtatatgaaccgattctcccgggatacagctatcccgcagatgtagacgaaattgtgcccgatcagcatatcgcagatgaaagaatagaaaacacggcgtcactgccgccgcttcagaacaaggaagaagttgatatatttgccttgctgggttttacctctgatatgcagaaagtcagtgaaagagactttggggaacaaattggaagcacgtggcgcaggggcgctgcgccggagcgtaaggatttaagcataggaagctattttgaaacgagaaataaaaacacaatcaaaatgaagacggataaaagaaccggaaaattaaaagcagcgctttcttttatggagcggccgaacaaccgccaatgctccacggaagaatgccaagagatagcgcttcaatttttgtatgccctctatccgagagcggctgagtttttcagggtgaatcccgtccgaattgatgaaagagggagagtccgcaaccatttttctgtctggtataaaggagtgccgctgcggttcggcgctgcccgcatcattgtcaatccggaaactgggttgattgacgcttttatggcgcctgatattgaacctgaacaattggaagcgataaatcacaggccggatgtttccgctgaagaagcaagagaagcgtttttagccgcttttgatgtgaagctggaatggcagcctgattttacagcaggcagtgaccagcactacaaacttgtctataagccggtttacccttcatatattgatgcgcacataaggaaaaagaaaaggctgtgaggggtgtctagttaggaatcatctccaagtgggggtagtccttgaatcgtttccaatccccgccccattcaaaaccgagtgtcttagcgatctcgacaacctccagccaatctgattttccgttttgattgccgtcatattccatatcccatatgatgcttccatcctttttttgaagggcgaaatcaatcgctaaaccatagttatgatacgattcccctcctcttgcataggtgacaatattccctttttttgtacgtccctgtttatataattcatcttgttccttaaaggacctgaatccttcagtaatgacgacggtaatgcctttattcgctgcagcggctttgagtgcatcggcattctgcttcacaatcggatgaagatccgaggggacaggcatgtcctgcagggcgttttgagaatgccattcatgccgaatataactaaaacaaagatctagaagaaatagaatacataagataacaaatgtttttgcgggtaacttcatatcggtctcactttctcaagatgtgctgaatgtgaacgcttttaagtgattgactctctctaaaagcgaacagctatgataaaatataacataaatagtagcaggaggaaggaggcagaccgatgagagcaaagattccatcagaagaagtagcagtaaagctgaatgaatggtacaagctcattcgcgcatttgaagcagatcaagcagaagcgttaaagcaggagattgaatacgatttagaagatatggaagagaaccaggacttgcttttatatttttctttgatggaattccggcatcgaatcatgcttgataagctgatgccggtgaaagacagcgacaccaagcctccgttctctgatatgctgaacgaaattgaaagcaatcagcaaaaactcacgggcttattggaatactacttttattatttcagaggaatgtacgaattcaagcagaaaaatttcatattagcgatcgaccattataaacatgccgaggaaaagctcgagtatgtcgaggatgagatcgaaaaagctgagtttctttttaaagtcgcagaagtgtattatcacatcaaacaaacgtatttttccatgaattatgcgagccaggcgcttgatatctatacgaaatatgaactgtacggtcgccgccgggttcagtgtgaatttatcatcgccggaaatttgaccgatgtgtatcatcatgaaaaagcactgacccacttgtgcagcgctttagatcatgccaggcagcttgaagaagcatacatgatcgccgctgcctattataatgtcggacactgtaagtacagtctgggtgattacaaagaagcggagggctatttcaaaacagccgccgccatttttgaggagcacaactttcagcaagctgttcaagctgtattttcactgacccatatctactgtaaagagggaaaatacgacaaggcagtagaggcttatgaccgcgggataaagagcgcggctgaatgggaggatgacatgtacttgacgaaattccgcctcattcatgagctgtatcttggaagcggcgacctgaacgtgcttacagaatgctttgacctgctggaatccaggcagcttcttgctgacgccgaagatctgctgcatgatacagcggaacgtttcaatcagttggaacattacgagtccgccgctttcttttaccgcaggctgatgaatattaaaaagaagcttgccgagcagcgttttcaataggaaatggcagagaactacaggttctctgctttttttgtgctgttttcaactcggaaaaacagggtattttccactgcatagtgagaaacagaggaggatatcaagtatgtacaaagatttaaccggaaaaacagcgattgtgacagggtcttcaaaaggaatcgggaaagccattgcggaacggttcggacaggagagaatgaatgttgttgtaaactaccacagcgacccgtctggagccgatgaaaccctggaaatcattaaacagaacggagggaaagccgtcgcagttgaggcggacgtgtcaaaagaagaggggattcaggcgctcttggacacagctttagagcatttcggcacgctcgatgtgatggtaaacaactctggttttaacggcgttgaggcgatgccgcatgagatgagtcttgaagattggcagagagtgattgatgtcaatgttaccggaacctttctgggagcgaaagcagcacttaaccacatgatgaaaaacaatatcaagggcaatgtgctgaatatctcaagtgttcaccagcagattccgcgccctgtaaacgttcagtattccacatccaaaggcggcatcaagatgatgacggaaacgctggcgctcaattatgcggataagggaatccgcgtcaatgcgatagcgcccggcaccattgccacagaatcaaatgttgatacgaaaaaggaagagagcaggcaaaaacaattgaaaaaaatcccgatgaaagccttcggaaagcctgaagaagtggcggcagcagcagcttggctcgtatctgaggaagcaagctatgtgaccggcgcaacacttttcgtcgacggcggaatgacactttatccatctcagcttgaatagaacacaaaacagggggattgcgggatgaaaacggactggtggaaggatgcagtggtgtaccaaatttacccgagaagctttcaggacagcaatggagacggaattggggacttgcgggggattatttcccgtcttgactacataaaggagctcggggcagatgtgatttggatttgcccgatctatccttctccgaatgttgattacggctatgatgtgacaaaccataaggcgattatggattcttacggaacaatggacgattttcacgagctgctggaccaggtgcatcagcggggattaaagctggtgatggactttgtgttaaatcacacctcggtcgagcatccgtggtttaaagaagcggagctggacaaaaacagcaaataccgcagctattattattggcgtcccggcacaaagaacggcccgccgacggactggctctcaaactatggatgcccggtctggcaatacgaagagcacaccggagaatactatctccatatgaatgccgtcaaacaagctgatttaaactgggaaaatcccgaagttcgccaggcggtgtatgacatgatgaaattttggctcgataaaggggtcgacggtttgcgaattgatcagctccatctcatttctaagaaagaatatcttccttcgtatgaggactatatcaatcagcaggcagagccgaagccctttcagccaaatggcgaacaaatccatgactatttaaaagaaatgacagatgaagtgttttcccaatatgatgtcatgtctgtcggagaggttggcagtgtcacaccggaagaaggcctgaaatatacgggaacagataagcatgagctgaatatgatttttcactttcagcatatggagcttgatcagcagcccggaaaagaacattgggatttgaagccccttgagctttctgatttaaaatcggttttgacaaaatggcaaaagaagcttgaacatcaaggctggaatacattgttttggtgcaaccatgaccagccccggattgtgtccagattcggagacgatggggaataccgcaaaacatcagcgaaaatgctggcagccgtactttattttatgaagggcacgccgtatatttatcagggagaagaaatcgggatgacaaacgcgccgtttacccggattgaagactacaaagatatccaaacgatcaatatgtatcataaacgggtgtttgaaaaaggctatgatccaaatgatgtgatgagatcgatcttagccaaaagccgggatcacgcccggaccccgatgcagtggaacagcggcaaaaatgccggatttactgacggcacgccttggctgaaggtcaatccaaacttcaccgcaatcaatgtggaggaagcgcagggagatcctgattcggtcttaatctattacaaaaagctgatcagcctgagaaagcagtacgcggacctcatgaaagggagctttgatcttttgcttccggatgatccgcagttgtttgtatacatgagagaaaacagtaaacagcagcttttgtcggtcaataatttttcaaaagagcaggctgtttttcagtggcccaagaactgcggcaaagctcaggcctctctgcttctcagcaattataacaacgatgatcttgctgacgaaatggtgttccggccttatgagagcagggtctatcttctggacaaaacaaactaatgattgaagtagcccggcatttttagccgggttttttagtacatatattcgctctgcaggcgggaagaataaatgaaaatgaaatttattcttgcaaaacgtaatgacttcggtttattatgatataggattacaaaatcgttatcattttgatttaaagtttctgaaaaagaggggatatacgatatgtttaaaaaatggagcggtttgtttgtgattgcagcgtgctttttattggttgcagcatgcggcaactcatcaacaaaagggtcggcggattcaaagggtgataaactgcacgttgtcacaacgttctacccgatgtatgaattcacaaaacaaattgtaaaagacaaaggcgatgtggatctgttaatcccatcttccgttgaaccgcatgattgggaaccgacgccgaaagacattgccaacattcaggatgctgatttgttcgtttataatagtgaatacatggagacatgggttccgtcagctgaaaaaagcatgggccaaggccatgccgttttcgttaatgcaagcaaaggcattgatttaatggaaggctctgaagaagaacacgaagagcatgatcatggggagcatgagcacagtcatgcaatggaccctcacgtatggctcagccctgttctggcacagaaggaagttaaaaatattacggcgcaaatcgtgaagcaggacccggataacaaagaatactatgagaaaaatagtaaagaatatattgcaaaactgcaggatcttgataaactatatcgtacaaccgcaaaaaaagcggagaaaaaagaatttatcacgcagcatacagcttttggctatctggcaaaagaatacggcttgaagcaggttccgattgcagggctttcacctgaccaagaaccgagcgcagccagcttggcaaagctgaaaacatatgccaaagaacataatgtaaaagtcatttactttgaagaaattgcatcctcaaaggtcgcagatacgctcgccagtgaaatcggcgcgaagacagaagtgctgaatacactggaaggcttgagcaaagaagaacaggataaaggtttagggtatatcgacattatgaaacaaaacctcgatgccctgaaagattcactattggttaaatcataagatagtgtgcgccggagggtgcacactatttctttgtgagaaaggaagattaacatgaatctcgtctcattgaaagatatcgttttcggctattcccatacgcctgttttagataaagtatcacttgatattgaaagcggtgagttcgtcggcatcactgggccaaacggcgcctctaaatcgacgctcataaaggtaatgctcggcatgctgaaaccgtgggaaggcacagtgacgatcagtaaaaggaatacagaagggaaacgcctgaccatagggtacgtcccgcagcaaatttcttcatttaatgccggctttccgagcacggtgctggagcttgttcagtcaggccgctatacaaaagggaaatggtttaaacgtttaaatgaagaagatcatcttgaagtagaaaaagcactgaaaatggtggaaatgtgggagctccgtcaccgtaaaatcggtgatttatcaggcggacagaaacagaaaatctgtatcgccagaatgctcgccagcaacccggatctgctgatgctggacgaaccgacgacagctgttgattacgacagcagaaaaggattttacgaatttatgcatcaccttgtgaaaaatcacaaccgcacagttgtgatggttactcacgaacaaaacgaagtacagcaatttttagataaagtgattcgattagagagaggagaaaaaggcggatggaaatgtttgacttggaattcatgcgacgagcttttctagcaggcggcatgatcgccgtcatggctccgatactaggagtgtatctcgttctcagaagacaggccttaatggctgacacactttcacatatctcattgtcaggtgttgccatcggcttttttctcagcaccaatataaccgcagcaagcatagtcgtcgtgaccatcggggcgatcggaattgaatacatgcggcgggcgtatcggacttattcagaagtgtccattgccatcttaatggcagctggtttgtccttcgcgatgtttttaatcagcctttccaaaggcacagccaatatgagcatcgatcaatacctatttggatcgcttgtgacagtaaaccagcagcaggtctatattatcagtattatcacactgctgatcctgctttattttatcgtactgagaaggccgctctacctgctgacgtttgatgaagcaacagccaaaacatcgggaatcaatacaaacgttctctcgttgtcattcagtattgtcacaggccttgcgatttcagtcattattccgatcatcggggtccttcttgtatcggccctgctcgtattgccggcagcattcgccatcagaattgcaaaaggctttaacatggttttcattacagccatactcatttcattattcagcgtatttacgggactgacatcatcctatcagctcgggacgccgccaggtccgtctattaccctgctattgatcgttttgctattaatcggatttgcagttcagggagtttggacgtttatcaaaaaagaagctcagcgcaaaaaaaggcaccgataacatgaaaagcagttttccctagggaaaactgctttttttatagaaacaatccggcaaggcgctcataagattcttttttcgcctcaaaatcaaacacattgcacagaaccatgatttcatttgtttcgtagcggcctgtgaggtctaacagctgttgtttgacagtggttggagaaccgatcaccatccgctttctgttttcttctatgagttttttatcggacgctgtgtagggataggctttcgcctcctcgatgcttggcacgcggctgtccaagccttttccgacgcgaagaagccacaaatcctggcttaatgcgagttcttctgcctcttcatctgttttcgcgcaaatgacaaaaatcgtaaacagtgcggacggattcgaaaaatgggctgagggccgaaagctttcccggtagatgcggaatgcattttctcctcgctcgggattaatgaaatgcccaaatacatatccaatcccctgttgcgccgcgcgtcttgcgctgttttcaccaagaccgagcacccatagctcgggtgccgtgtcaataaggggcgccgctttgattccggcatacggatggtcgggaggaagggaatctgttagaaaataagagacatcctgcagctgtctgttaaattcggttaagctttttttcaccccgtccgttaatgcaagcctggtttttgtcgtgccgccgggggaacggccgacgccgaggtcaatccggtttggatacagggcctcaagctggcgaaaggtttcagccactttaaatgggctgtattggggcagaagcacgccgcctgatccgacacgaatggtgtttgtctgtgctgcgatgcgggcgatcatgatttcaggcgctgtgcttgccagtcctttcgtgctgtgatgctcggcaaaccaataacgcttatagccccactcttcactaaatcgagcaagctcaaccgaatgctgaagagttgtcacagggccctctcctttagaaacaggagcctgatcaagtatgcttaaatgaatcaaaaggccgcttcctttctgtctgtttttagatggtgacaccagaataggcaaaatgacttgcccgcgtcaaatggtttgtttaagaagcgcactttatagcatttgcaaatcatatatcaaatatggaagttttttttcgaggtttttcgtcaattattcttaacttttacgaaactttgatataataacaaacgtatatattagtaatttacggcttattttccttgtgagcgtaaaaataaatgtgactatcttcacattttgatgagtaggagtgaatcgtgtggcaatttctttagaaaaaggtcaacgaattgatttaacaaaaggaaaagccggtctgtcaaaattgatggtcggtctcggctgggacccagtgtcctcaggcggagggttcttcagcaaactgcttggcggaggcggtccgaatatcgactgtgacgcttcagtgctgatgttggaaaacggaaaattcaccgataagaaaaacctgatttatttcggcaacctgaaaagccgctgcggcggtgtacagcatacaggcgacaacctgacgggtgacggtgcgggcgatgacgagcaaattatgatagatttagataaagtgcctgcaaacatcgataagcttgtatttgtagtaaacatttacgattgtgtcagaagaaaacaagatttcggcatgattcaaaatgcgtttatccgcgtagttgatcaatctaatcacgaggaaatgctcaagtacaatttgagagacaattacgccggcagaacaagcctgattacagcagaaatctaccgcagcggcagtgagtggaagtttgcggcgatcggtgaaggcacgaacgatacgagattagaagatattatcagccgatacgtataaaagaaaaggagtggatgaaacatgacaatttcattggcaaaaggacaaaaagtagatttaacaaaaacaaatccgggtctttcaaaggttgttgtcggtttaggctgggatacgaacaagtatgacggcgggcacgactttgatcttgactcaagtgtgtttctgttagacgccgcaggcaaatgcgcgtcaccaaacgactttattttctacaaccagcttgaaggcggcaacggttcagtcgttcattcaggcgacaacctgactggtgctggcgaaggcgacgatgagaatgtaaaagtaaatctcagcgctgtaccggcaaacattgataaaatctcatttgttattaccattcacgatgcagaagcgcgcagccaaaactttggacaagtatcaaacgcgtttgtccgcatcgtaaatgaagaaacaaatgaagagctcatccgttacgatcttgcagaagatttctctattgaaacggcaatcattgcaggggagctttacagacataacggcgagtggaaattctcagcaatcggctcaggctaccaaggcggccttgcccgcattgcaacagactacggtttgcaagtcggttaagacaaatacgaagagcagaaaggagagaggcagtatggccattcaattatcaaaaggacagcgcattgatttaacaaaaacaaatccgggactgactaaagcggtgatcggcttaggctgggatacaaacaagtattccggcggacacgattttgacctggatgcttcggcctttttagttgatgcgcatgataactgcgtaaatgatctcgatttcgtcttctataataaccttgaacatccgagcggcggtgtcatccatacgggtgacaaccgcacgggtgagggcgacggagatgatgagcagattatcgttgatttctcgaaaatccctgctcacattgagaaaatcggcatcacagtgaccattcacgacgctgaagcacgcagccaaaactttggacaagtttccaatgcatttgtccgcgttgtggatgaagaaacgcagaatgagcttcttcgcttcgatttgggagaagacttctccattgaaacagctgttgtcgtttgtgagctttacagacacggcggcgagtggaaattcaatgcgatcggcagcggattttccggcgggctggctgcattgtgccggaattacggtttgcaagtgtaagcgagtgacaaatagagaagtcaccgtttcaaattaataggaggaaaaaacttggactttttacatcatattttgtctacgtatgcttcatttttcgattggaaaatgtggggggaagttctgactgatcctgtttcctggggtttgatcggttcccttgttgttctggaaggccttttatcggccgataacgcgcttgttcttgcggtcatggttaaacacctgccggaaaaacagcggaaaaaagcgttaacgtatggtttgtttggagcttatattttcaggtttattttcatcgggctcggtatgcttctcattaaattctggtggatcaaggtgcttggcgcgctttacctggcttggctcgtcattaagcacttctggattggcgaaaaagaagaggaagcggacggcatcaagaaaaactcttggatggtccgcacgttcgggatcttctgggcgactgtcatttcagtagaattaatggatcttgccttctctgtggacagcatcctagccgcgtttgcagtatctgaaaaagtatgggtgcttctgatcggcggtatgcttggtattttaatgatgcgtacagtggcaaaagtgttccttgtgctgattgataaaattcctgagctggaaaacacagcattcgtgttaatcggcattatcgcgctgaaaatggcggggagcgctttccattacgaaatgccgcactctgtattcttcattatcattatcgctgcatttgcggtaacattgatcattcactacatcaataaacaaaagcaggtgcgcgaacaaacagccgcttcaaaagaagaataaaacaaaacaaggagggaggttcaatgtccttccttttttgttaccgaaatatcgttcaatgacaaaccggaaaggaggatatgatgagacaagaagaactaaccattcataaagcacttccggctgatggcgattggaaaagcctgctgtttcagccattgccggagcgggatcactatgaaactgcacaaggcctttctttttctcgtcttgccggtcagatattgggcacgcctattgatgagacggactactataacgagctatatgagctgtctgtaaacgaccgcataacgattttgagtgaaacgcttgataaaacaatcgaaccggaaacatttcaaaagcttcagcatattcattccatcaatcagaaagaaaaagggctgtcagtcagccgctttgttgcctttctggacggggaaaagctgattgcgaagcactcaaatcccctgatgcaccgccatttaagaaaagcgctgatgacgcttttacatacctttgcggacagtcatgaaaaggggctgaatcatcctgattttcgcagagtgctgcttgatgtctcgaagttttccttaaaccatctgaacccttggctggaaaaaaccgatatagagcgggagatgccgaaggttgtttggtatggagatgcgacgaaaagccagctctatttcttatattatctgatgctggtcggctgtgatgtactgctgttccatccggcgggaacggatcagctggcgcttgtcgacccgaagcaggagctcggttttacggaaaagctcccggatgtttcggagcttcagccgttcccgaaagaaaaaccagaccggaaatcaacagtggcttaccgctcaacaaaggaaattgaacatgtgctgaatcacgaggaatccatgctgtataagccgtggcagttcagagatcacacaccggtgtccgttacgctgaaaacgacctatgatgaattgtttttaatcacgaaagaacgcgcctttattcggccgaatttcaaagctgataaacattcaattgagattccgaatgtattcgccaaaattatgggcgtgtcgaaagacaataaggaatattggaacaggcttcatactctagcggattatcaggaaacagaaatggtcagaagctttccatttacagaagaaataaagtcgaactatcaatttcactacagccacgcacttgatcaagaagggaacattgatccggacaagctgatggcaagcaatgtgtggcagtacaaacagctgccggcgggcgttcagactgccattgccaaaacgatttcgagaatgtgcaggcacccgcggcttaaagctttgcatcaggaacaagtcaaggatgttcaaatctatttgtttaaacaaacaacaaatctgcctgctaatctgctgaaattgattcaaatgttcgactatgcgcaaaccgttccgaaactcgttttatatcatacggaaatgagcggcggactcacgcgttcggatgctgctgccctgctgttcctgaatgaaattggaatcgatatcatcatttataatccgcccggacaccaagatattgagcagtttattgaagatgaccagtatgatatccactggctggatgacatggtgtttcagcaggactacaaagagccttcgcttgtgaaaaggctcttcagaaccattacccaaaaataaggagagaagaaaagcatgacaacagaaaatcaaaatccgcttgttctcgataaaaatgaagagatttcccagcaaaaagctgacgatatccgtcttcagcttcgtcaggaaccagaagtgaagcggcttgctcaacaaattgacgtcaaaaaccaaatggagctgcttgagtacggcaaggagccggccgttgaaatatccaagttctctgaccgcatcttagggatgatgaaaacaacaagcgtgacagactccggcacaatgctgactcagcttgggaaaatcatggaccgcttcgacaaaaatgattttgatgagccaaagggattaatggcgaaaattttcaaacgcggcggcagcatgattgaaaaaatctttaaaaagtatcagacgcttggcggagagattgaaaaaatccacgttgagatttcaaaatacaaagatgagatgacgaagacgaactacacgctcgatgaaatgtatgaaaacaatatcaaatactatatggagcttgaaaaatacgtcgttgccgggcagatgaaactggaagagatgcagtcgatccttccttcatatgaggaaaaagcggcaagcgggaaccagctggcgcaaatgcagctcgatacgttgcgcaacggcattcaggcgcttgaggaacgggtgtatgatctggatatggcacggatggtggcgcttcaaactgctcctcaaatccgtctcctgcagcgaggaaatgcaaagctgatcgggaaaatcaactccgcgtttatcattaccattccgattttcaaaaacggcattattcaggctgttacggtaaagcggcaaaagcttgtggctgattccatgagcgagcttgaccgccggacaaacgagatgctgaaacgaaatgctgaaaacatctcgagccaaagtgttgaaattgccagaatggccggcagaccgagcatagatattgaaacgatcgaatcgtcttggaacacgattgtcagcggcatgcaggaaacaaaacaaatcgaagaagaaaacaagcgcctccgcgaagacggcgcgagacgaattgcacagcttcaggataatattaaaaaagcagcattgcagcaataagaaaaaccccgcttgtggaacataagcggggtttttcaattacatcatttagttaatgacaatgtgtaaagacaggtgtaaacttaaacggtaatcattttgcatatcagaggtgttggcaatgggaaaacaacagcctatatcccagcgtaaactgctgggcgtcgccggtttggggtggctgtttgatgcaatggatgtcggaatattatcgtttattatcgccgcgctccatgtagagtggaatctgtcgcccgaggaaatgaaatggatcggaagcgtcaattccatcggcatggctgcgggtgcgtttttgtttggtttgcttgctgatcgaatcggccgcaaaaaagtgtttatcatcacccttttatgcttttccatcggaagcggcatttccgcttttgtgacgagcttatcggcatttctaatccttcgtttcgtgattggtatgggacttggcggcgagcttccagttgcttcaacactcgtttcggaagcggttgtgcctgaaaagcgaggcagagtgattgtgcttttggaaagcttttgggccgtgggctggctcgcagcggccttgatttcttactttgtgataccaagctttggctggcaggctgccctgctgttaactgcgctgactgctttttatgcgctgtacctgcggacgagtctgcctgattcgccgaaatatgaatcgctttctgccaaaaagaggtcggtgtgggagaatgtaaaaagcgtctgggcaagacagtatatacggccgaccgtgatgctgtcgatcgtttggttctgtgtggtgttttcttattacggcatgttcctatggctcccgagtgtcatgctgctgaaaggcttcagcatgattcaaagctttgaatatgtcctgctgatgacgcttgctcagctacctggctatttctctgccgcatggctgattgaaaaagcgggccggaagtggatactcgtcgtttacttgattggcacagcaggaagcgcctatttcttcggaacggcggattccttaagtcttctgcttacggctggaatgctgttatcgtttttcaatctcggtgcatggggcgtgctgtatgcttataccccggagcaatacccgactgcgattcgagcaacaggttcaggaacgacagcagcgtttggaagaatcggcggcatcttcgggcctttgcttgtcggaacgctcgcagcccgtcatatttcgttttcggtcatcttttcaatcttttgcattgcaatcttactcgcggttgcttgtattttgattatggggaaagaaacgaaacaaactgagctagaataggaaaagcacctcttgaatgaggtgctttcgcgtgtcgacaaaccctcgcattcgttgtcaggactgcgcttcggtgctcaatgcgaagtggatcaacggctaaattctcaggcgtcctgcctaaacgccgtcgtcatcacatcctgtgaatgtccgctcctatgctcgtccttcctagacttcaagggttttcaatcacgctgaaaaaatgacaaaattctaaaatgaaaaccattttagaattttgtcaacaatctgaggtacctctgaatgaggtgcttttttacaattgcgcccgggctgcggattggcgtttcccggttttactaattgtctggtagagcgtcatagaaagtatgaacagaatggcagtaaatcctgtgacagctccgaaatgctgtgtgctttgatataaaaaacctgcaatacttgtaccgacagtggttccggcatacatagcggcattggaaagggaagcaatggttcctcgcgcatttggtgcaatggattgaaagacacccatcattaacggaaagatgatgccagctgtaaagaacgtgagaaaaaagccggcttctactaaaaacaagtttggaaagaacggaagagcgaaatagagagcgcccattagcagcatcccgctgatcagtgttttaaacatgcccagcttttctgaaacccggctgccgataaggctcccgagcatatttcccagtccgagtacaagcatagctgcgccaatttgtgacacggttaaatgataatccgcggaaagccaagtacccagaaagctgaacgatgcgaagtttccggtttgaaacagaaaataggcaagcagaatgaccgatgttttcggcaatgaaaaaagctcccgataggggttgacaattgatgggcgcgccaatggttcagaaggccggatgccaggcatgaccgccgccaggatcaatagaagaataagcgagcacgctgacaaaacgaaaaatggcgtatgccatgtaaaggaagcgagaaaccctccaataggaagtccgagcatttgtgaagcggccaaacctgctgtcgcaatccccatgccttttatgatctgagaaggctggacaatgactgggatggacgcccaaatttgaggcgtcacaaacgcagcgctaacgcctgcggcaaaacggaacaggcacatggcggcaaaagagggagcgatgccgcataaaaacgtggatacaataaagcctgcaagtccccacagcatgactgttttcctgttcagccggtctgagattgggcctgcaatgaaagcgaagagcgcataaccgagtgcataagcactgaccatccagcctgacaaatcagtagagacatgaaactgatcctgtaaaagggggagaagcggcgaaagcaaaaaggtatccgtgccaatgacaaacatgacactgaagaaaagccaaatgcgattcaaatttatcactcctattgttttataactttgaaactatgaaacagatatgtatagagaaaaccctttgttagagggtttccaaaaagccaggcaggtatgtttgaaatgtgtcttcacgcagactgacgtattttgtccgcgaatctttccgggttgccgtcaatcccgcttcacgcagcgttttaaaatgataagatgccgtggttttgacaatattgcacttttcacctacttcaccgcagctgagttcttttccgctgacataaagcgtacgaataatggcaagccttgattcatcagacagtgctttaaaaatttgcgctctgatttgatcatctgattgtttcatagtcatgaaactataatacataatgggtgttgaaaaagcaacttatttttccagtaaaggagcaggaagtcataagaggaaggaggaattcaattccaataaaagcgttttcaactaaagataggcgaaaaatcacccgtaaaatacaatcatataggaggattacagagcatttagaagcataaataagatcatgtggtcacatggatgtttataaagaaatggtacagaataaaagagaatatgctgtttgtgtaggaagttacataaatgttacggtaataaagattgcttaatatggagggaaaatatgagtgtagatgagaaaccaattaagataaaagtcgagaaagtctctaagatttttgggaaacaaacaaagaaggcagttcaaatgcttgccaacggaaagacaaaaaaagagatcctgaaagcaaccggatcaaccgttggggttaatcaggcagattttgaagtatatgatggtgagatatttgtcatcatgggtctatcagggagcggtaaatcaactttagtacggatgttaaaccggcttattgaaccgactgccggaagtatttacattgatggtgacatgataacaaatatgtcaaaagaccagctccgggaagtccgccggaagaaaatcagcatggtcttccaaaagttcgctctgttcccgcacagaacgatacttgaaaacacagaatacggactggagcttcaaggtgtagacaaacaagagcggcagcaaaaagcgcttgagtctcttaagctcgttggactggaaggatttgaacaccaatatcccgaccagctttccggcgggatgcagcagcgtgtcggccttgcccgcgcgttgacaaatgatccggacatccttctgatggacgaagcgttcagtgcgcttgatccactgattcgtaaagatatgcaggatgagcttcttgatcttcacgataatgtcggaaaaacaattatctttattacgcatgacttggacgaagcgttgcggatcggcgacagaattgtcctaatgaaggacggcaacatcgttcaaatcggcacgcctgaagaaatcctgatgaatccatctaacgaatatgttgagaaattcgtcgaagatgttgatttgtctaaagtcctcacagcaggccacattatgaaacgcgctgaaacagtgcggattgataaagggcctcgcgtagcattgacactgatgaaaaaccttggaatttcttcaatttatgcagtggataaacaaaagaaattattaggtgttatctatgcgtctgatgctaaaaaagcggctgagtctgatttgtcacttcaagacatcttgaatacagaatttacaactgtaccagagaatacgtatctgactgagatttttgacgttgtgtccgatgcgaatattccaattgcggttgtggatgagaagcaaagaatgaaaggaattgtcgtaagaggcgcgctgattggcgcacttgccggcaataacgagtatatcaatgctgaaggcactaacgaacaaacacaagatccttctgcacaggaggtgaaataagatggatagactgcctagaatacctttagcagatattattgaccgttttgttgactggattacgatgacgtttggcggattcttcgacggaatcgctaacggattggccgcttttgtaaatggaattgtcaccggtcttggatttattccatctattttgttaacgattattttcgccgcacttgcgtggtggatcagtacaaggggaattgcgttatttacgttgattggattcctcctgatcgattatttaggatattgggacccaatgctgcaaacattggcgcttgttttgacatctgtgattatttcgattgtggtcggggttccgatcggaatttgggcgtctcagaaagaaacggttcgccgtattgtaacgccaattcttgatttaatgcagacaatgcctgctttcgtatatctattgccggcgattttcttctttaacatcggtgttgtgccgggtgttgttgcatctgttatcttcgcgatgccgccgacaatccgcatgactgttctcggtattaaacaagtgccggcggatttgattgaagcgactgaggcattcggttctacaacagttcagcgtttgtttaaagttcagcttccgcttgcgacaaaaacgattttggccgggatcaaccagagcatcatgcttgcattatcaatggttgttatcgccgcaatggtcggtgcaccgggacttggttctgaagtatacagtgccgttacacagctgaaaaccggggtcggagtagaggccggtatcgccatcgttatcgttgccattaccctggaccgtattactcaaaatattaaagtgaagaagaaaagcagggggaatgcctgatgcttaaaaaaatcatcggcatcggcgtttccgccatgctggcgctctcacttgcggcttgcgattcagaaaacgatgaaaatgcatccgcagcagaacaggtgaataagaccatcatcgggattgaccccggttcagggattatgtccctgactgacaaagcgatgaaggattatgacctgaatgactggacattgatttcagcgtcaagtgctgcgatgaccgctacgcttaaaaagtcatacgaccgtaagaaaccgattatcattacaggatggactccgcactggatgttctccagatataagctgaaatatctcgatgatccgaaacaatcttatggcagcgcagaggaaatccatacgatcacacgcaaaggcttcagcaaagagcagccgaatgccgcaaagcttctgagccagtttaaatggacgcaagacgaaatgggcgaaatcatgatcaaggtggaagaaggcgagaaacctgccaaagttgctgctgagtacgtcaataaacacaaggatcagattgccgaatggacaaaaggcgttcaaaaggtgaagggagacaaaatcaaccttgcctatgtggcgtgggacagtgagattgcaagtacaaacgtcataggcaaagtcttagaagacttgggctatgaggtaacacttactcaggtagaggctgggccgatgtggactgcaattgcgacgggaagtgcggatgcatcactttccgcatggctgccgaatacccataaagcatacgccgctaaatataaaggcaaatatgacgatattggcaccagtatgactggtgtgaagatggggcttgttgttcctcaatatatgaaaaatgtcaactcaattgaagatttgaagaagtaatcaaaaaagcagcctgtgtcaggctgctttttttgcgttattttacgtaagcggcagcgggtgaatcagccttttgaaaagtttttaatacggcattcgctaaaatatgaatgccggtaaacatcgcgtttcggtcaaaggtcatgtgcggatgatggagccccggctggagcccgcagcctagtccgagcatcgttgttttcagattcggcaccttcacggcgtaaaaatggaaatcctctccgccggtagtgacaagcgggtcatcaagccgctcagccccgatgatatctgtaatggcttctgccatgatcgcttcagcttctttgttttgtgttgccgcaggaaggctgtgttctttttgcagctcgatttttgcgccgaatgcagcggcggccgcttcacaggctctttctgtctcggcgattaacgcctccatggcttcattggtctgtgcgcgcaaatcaaggctgaacgatgcttttcctggaatgatgttagagctttcaccgccggcttgaagttttgtcattttgacggtatgcgggatttgcgggtcaatatgaatgagtccgagcttatgtacaagaaatgccgcaatttcaatgctgttttttccgagatgcggacgggcgccatgagcctcttccccgatgatcgttccctcaatgtgctggcttgatccgtgcagaatagacggagcgcagcggccgttctgtgtttcctgaatcgggcggacgtgaacgccatacaaatagtcgatatcatcaagcacgccttcttctatcattttcaaggcgccgccgcctttttcttctgccggctgaaagataaaacggattgtgcccttcggaagctcaggttgtttttttagcagcattaatgtgcccaatgccattgtcatatgtgaatcgtgtccgcaggaatggttggcgcgaaatgtgccgttaacctcctgccacagcgcgtcaatatcagcgcgtaccgctacaacaggtgagcctgagccgatttcgccgacaaccccggtgcagtctgaaaacgtgcgcgtccggcaccctaaatcctcaagcttttgtttcaaaaatgaagttgtctcatattccttccagctgacttcagggttcgcgtgcagatgctcgaagatgtccataatggtttgtttcatgtcttctgaaagcttttgcatggtaagaaatacctccttctatcagaatgaatttttaccttctttactttatttatattgaaacaggaagataggctgtatataatatagcacatattgctactattcagaataattaatattttcaaacagaggggatggatcgaaatatgagtatgccagcagccgaaacacagcctaagaaaaaacgaatgacatttaaaatgcctgacgcttatgtcctcttatttatgattgctttcatttgcgcaatcgcttcatatattgtgccggcaggtgaatttgaccgcgtgacaaagggggatgtcacgaccgctgttccgggaagctatcattccattgaacagtctccggtcagcttgatcagcttttttacttctctacaggatggaatggttggatcagcacccatcatctttctgattctattcacaggcggcaccattgctattctagaaaaaacgggtgccatcaatggcctgatttacaatgtcatcagcaaattccgcacaaagcaattattatttatttgtattgtcggcgcattgttctccattctcggaacaaccgggattgtcgtgaattcagttatcggttttatccccatcggcctcattgtggcacgatccttaaaatgggacgcagtcgcgggagccgctgttatatacatcggctgctacgctggatttaactccaccatattatcaccgtcaccgctcggtttatcacaatcaatcgcggagctccctcttttctcaggaatcggcctgcgagttgtgatatacatatgctttttgctgtcttctattatttatatctatttgtatacgagaaaattaaaaaaatcaaaagatgccagtgtgttaggaacagattggttccctgcggcaggaatgggcgaagccggtaaagaagaagatcagtcagtgccgtttaccgttcgccataagctgattttggctgtggcgggactctcacttgtcggatttttatacggcgctttgaagcttggctggtcagattcccaaatggctgcgacatttatttttatttctgtccttgccggtttaataggcgggcttgcggcgaacgatattgccaaaaccttcattacgggctgccaaagtcttgtatacggggcgctgattgtcgggatggcacgaagcatttccgttatccttgaaaatggaaagcttctcgatactgtcgtcaatgctttggcttcacttttggatggattcagcccgattgccggggcaatcggcatgtatatcgccagtgcgctgcttcattttctcatctcttcaggttctggcgaagccgttgtatttattccaatactggcgccgctcgctgatttgatgggaatcacgagacaggttgcggtggaggcagttatgcttggagaaggggtcgtcaactgtgtgaacccgacatccggcgttctcatggcggtgcttgccgccagcggtattccgtatgtcaagtggctgcggtttatggtgccgcttgctctgatttggttcttgatcgggcttgtctttatcgtgatcggcgtcatgatcaattgggggccgttttaacgattgctgcccgccggcttgtacggcgggcttttgagttattcattgcagaagcgcaggctgttattgtaacatgtaagccataagccattcgtaaaagtgcgggaggaaggtcatgaataatctgcgtaatagactttcaggcgtgaatgggaaaaataagagagtaaaagaaaaagaacaaaaaatctggtcggagattgggatgatagcgggagcatttgcgctgcttgatgtgatcatccgcggcattatgtttgaatttccgtttaaagaatgggctgcaagccttgtgtttttgttcatcattatcttatattactgcatcagggctgcggcatctggaatgctcatgccgagaatagacaccaaagaagaactgcaaaaacgggtgaagcagcagcgaatagaatcaattgcggtcgcctttgcggtagtggtgcttacgatgtacgacagggggattccccatacattcttcgcttggctgaaaatgattcttctttttatcgtctgcggcggcgttctgtttctgcttcggtatgtgattgtgaagctggcttacagaagagcggtaaaagaagaaataaaaaagaaatcatcttgaaaaatagatggtttctttttttgtttggaaagcgagggaagcgttcacagtttcgggcagctttttttataggaacattgatttgtattcactctgccaagttgttttgatagagtgattgtgataatttaaaatgtaagcgttaacaaaattctccagtcttcacatcaggttgaaaggaggaagcggaagaatgaagtaagagggatttttgactccgaagtaagtcttcaaaaaatcaaataaggagtgtcaagaatgtttgcaaaacgattcaaaacctctttactgccgttattcgctggatttttattgctgtttcatttggttctggcaggaccggcggctgcgagtgcagaaacggcgaacaaatcgaatgagctaacagcaccgtcgatcaaaagcggaaccattcttcatgcatggaattggtcgttcaatacgttaaaacataatatgaaggatattcatgatgcaggatatacagccattcagacatctccgattaaccaagtaaaggaagggaaccaaggaaataaaagcatgtcgaactggtactggctctatcagccgacatcgtaccaaattggcaaccgttacttaggaactgaacaagaatttaaagaaatgtgtgcagccgctgaagaatatggcataaaggtcattgttgacgcggtcatcaatcataccaccagtgattatgccgcgatttccaatgaggttaagagtattccaaactggacacatggaaacacacaaattaaaaactggtctgatcgatgggatgtcacgcagaattcattgctcgggctgtatgactggaatacacaaaatacacaagtacagtcctatctgaaacggttcttagaaagggctttgaatgacggggcagacggttttcgatttgatgccgccaaacatatagagcttccggatgatgggagttacggcagtcaattttggccgaatatcacaaatacatctgcagagttccaatacggagaaatcctgcaggatagtgcctccagagatgctgcatatgcgaattatatggatgtgacagcgtctaactatgggcattccataaggtccgctttaaagaatcgcaatctgggcgtgtcgaatatctcccactatgcatctgatgtgtctgcggacaagctagtgacatgggtagagtcgcatgatacgtatgccaatgatgatgaagagtcgacatggatgagcgatgatgatatccgtttaggctgggcggtgatagcttctcgttcaggcagtacgcctcttttcttttccagacctgagggaggcggaaatggtgtgagattcccggggaaaagccaaataggtgatcgcgggagtgctttatttgaagatcaggctatcacagcggtcaatagatttcacaatgtgatggctggacagcctgaggagctctcgaatccaaatggaaacaaccagatatttatgaatcagcgcggctcacatggcgttgtgctggcaaatgcaggttcatcctctgtttctatcaatacgccaacaaaattgcctgatggcagatatgacaataaagctggggcaggttcatttcaagtgaatgatggtaaactgacaggcacgatcaatgccaggtctgtggctgtgctttatcctgatgatattgcaaaagcgcctcatgttttccttgagaattacaaaacaggtgtaacacattctttcaatgatcaactgacgattaccttgcgtgcagatgcgaatacaacaaaagccgtttatcaaatcaataatggaccagagacagcgtttaaggatggagatcaattcacaatcggaaaaggagatccatttggcaaaacatacaccatcatgttaaaaggaacgaacagtgatggtgtaacgaggaccgaggaatacagctttgttaaaagagatccagcttcggccaaaaccatcggctatcaaaatccgaatcattggagccaggtaaatgcttatatctataaacatgatgggggcggggcaattgaattgaccggatcttggcctggaaaaccaatgactaaaaatgcagacggaatttacacgctgacgctacctgcggatacggatacaaccaacgccaaagtgatttttaataatggcagcgcccaagtgcctggccagaatcagcctggctttgattacgtgcaaaatggtttatataatgacgcgggcttaagcggttctcttcctcattgagggcaatgctagaggggacttaccgaaagaaaccatcatagatggtttcttttttgttcataaatcagacaaaacttttctcttgcaaaagtttgtgaagtgttgcacaatataaatgtgaaatacttcacaaacaaaaagacatcaaagagaaacataccctggaaggatgattaatgatgaacaaacatgtaaataaagtagctttaatcggagcgggttttgttggaagcagttatgcatttgcgttaattaaccaagggatcacagatgagcttgtggtcattgatgtaaataaagaaaaagcaatgggcgatgtgatggatttaaaccacggaaaggcgtttgcgccacaaccggtcaaaacatcttacggaacatatgaagactgcaaggatgctgatattgtctgcatttgcgccggagcaaaccaaaaacctggtgagacacgccttgaattagtagaaaagaacttgaagattttcaaaggcatcgttagtgaagtcatggcgagcggatttgacggtattttcttaatcgcgacaaatccggttgatatcctgacttacgcaacatggaaattcagcggcctgccaaaagagcgggtgatcggaagcggcacaacactagattctgcgagattccgtttcatgctgagcgaatactttggcgcagcgcctcaaaacgtgcacgcgcatattatcggagagcacggcgacacagagcttcctgtttggagccacgcgaatgtcggcggtgtgccggtcagtgaactcgttgagaaaaacgatgcgtacaaacaagaggagctggaccaaattgtagatgatgtgaaaaacgcagcttaccatatcattgagaaaaaaggcgcgacttattatggggttgcgatgagtcttgctcgcattacaaaagccattcttcataatgaaaacagcatattaactgtcagcacatatttggacgggcaatacggtgcagatgacgtgtacatcggtgtgccggctgtcgtgaaccgcggagggatcgcaggtatcactgagctgaacttaaatgagaaagaaaaagaacagttccttcacagcgccggcgtccttaaaaacattttaaaacctcattttgcagaacaaaaagtcaactaaccgcaactttagagtaaagggctgattgtcaatgtgggagcagttgtatgatccgtttggaaacgagtatgtgagcgcacttgtggcgctcactccgattctcttttttcttttggctttaactgttttgaaaatgaaaggcattcttgcggcatttcttaccctagccgtcagtttcttcgtctccgttttggcatttcatatgccggttgaaaaagcgatttcttctgttttgttaggaatcgggagtgggctgtggcctattggctacatcgtcctgatggcggtgtggctgtataaaatcgcagtgaaaaccgggaaatttaccattattcggtccagcattgccggcatttcgcctgaccaacgattacagctattattaattggtttttgttttaacgcgtttttagaaggcgcggccggttttggtgttccgattgcgattagtgcggcgctgctcgtcgaacttggttttaaaccgttaaaagcggcagcgctctgcttgattgcaaacgcagcctccggagcctttggggcgatcggaattcctgtcatcacaggggcgcagattggtgatttgtctgctcttgagctgtcacggacattaatgtggacactgccgatgatctcatttttaataccattcctgcttgtattcttattagaccgaatgaaaggaatcaaacagacatggcccgctcttctggttgtgagcggtgggtatacagcggttcagacactgacaatggcggtgctcgggccggaattagcaaacattttggctgccttattcagcatgggcgggcttgccctcttcctccgcaaatggcagccgaaagagatttaccgcgaggaaggggccggcgatgctggtgagaaaaaggcataccgtgccgctgacattgcgaaagcgtggtctcctttctacattttaactgcggcgatcaccatctggagccttcctgccttcaaagcgcttttccaagaaggcgggctgttatatcaatcaacgctcctgttcaaaatgccttttctgcatcagcaaattatgaaaatgccgccgattgcgccatctgccatgccgttagatgcagtctttaaagttgatctgctgtcagcgactggtacagcgattttagcggcggtcatcgtgacagggctgttcagcaaaaagttctcctcccgggatgcctttgcttccctgaaggagacaggaaaagagctgtgggtgccgattatgacgatctgcttcgtgatggggtttgccaatctggccaacttcgcagggctcagctcttcaattggattagcattggcgaaaacaggagacctgttcccgtttgtcagtcctgttcttggctggattggcgtgttcattactggttctgttgtcagcaataatgctttgttcggtcatttgcaggttgtcaccggagcgcagatcggtgcgggttcagacttgctgttagccgcaaatacggcgggcggtgtcatggcgaaacttgtttctcctcaatctatcgccatcgctgccgcagcggtcggccaaacaggcaaggaatctaaactgtttaaaaagacagtggcgtacagcctgattctgttagtgattatttgtatatggacgtttattcttgcaagatttggagtgtaatagaaaagagcagtacatgcccagcatgtactgcttttttatgttaatttgctttctttgtcatttcggctgttgttttcactctggctttccccataaataaaatggtaaccgccgcgaggacaattggaatcaaagcgagcaaaaacacatacgtaatacttgatgacatcgcgtcaataatgcgattcaggatcgcatcaggaatctgggaacgtgttccagcttggaatatctcctgcgggtcgccaatattttgcgcagcacctgatcccgctgagcctttcatcccgctgaaggcgtcggtcagcttgttcgtgaatacgtttgtttgcaccgttccgaaaatggtgacgcctaaggtcatgccaaatgatcgcaaaaatgaatttgtagagtttgccgttccccgaaagcgaggttcaagatcattcatcgatgccgccggcagcagggagaagttaaagcctacaccaaagcctgaaatcatcataaagactgtcagccatacccgtgctgtgtcaggcgtcatattggaaagaagcagcatgccgataaagaaagctataacagatatcagcatcaaattgcggaagcttgccttcgtttggaagatcccgccgatcatgcttccgatgactgatccaatcatcatcggcgtcagaatgaagcccgcgcttgtcgccgagctgccgtagaccgcctgaacgaaaatcggaataaataccgctaaaataataaatgttccgccatacaggaaagcgagaatctgtgctgtggcaaacaagcggttcttaaacatccagaaagaaataatcggctcttctgcttttctctccacaataaaaaaggcaatgaagaaaacggcgaatacaataaacagcccgatgatctgaatggaattccaatcgtatgttttgccgccaagctcaagggcgaacatcaggcatacaatggatacgactaaggtaatcgcgccgccccagtctattttctgctttctgtgctccagagattctttgtagtagcgaataatgaaaaacaatgacaatgcgccgatcggcacattgatgtaaaacacccagtgccagctgatcgaatctgtaatgatcgcgcctaagagcggaccaagaacactggataatccaaatacagcaccgaacatgccggacatttttccgcgtttttccggcggaaacaaatcaaagataatggtaaaggcaatcggcaggagcgcgccgcctccgatcccttgaatggcccggaagatgatcagctgattcatcgtctgggcaatcccgcataaagcagaaccgattaagaaaaaaataagtccaaacaggaaaaaacgttttcggccgtacatatcggaaagcttgccgtaaatcggcatgccagccataaccgccaccatataggatgccgtcacccatgcaaatttatcgaaacttccaagatcggctacgatattgcccatcgcggtggcaacaatcgtattgtccattgcagacatcaagatgcccagcaggagaccgaggaccacaaatttggtggaagcctgttttgctgttgttgtgtccatttgttctacctcctcttacttttctatgtaagttctgatatcatgataatagtttgattgttgaatatctcgattatcaagataaactcgattttatagggaggactgtcagttgtcaacaagaaattccagaagtgagttggaaaagactgctgttcagctttttcgaaaactgggcacaagaacggttctgtttcatcaggcagccgctcaagctctcggtctgtttcccaccgatttgaaatcagctgacattttaaatgaagcagggccgatgacggccggagaactgggaaaaaaaaccggcctcagcacggggtcagtcacggcgcttgttgaccggctggaaaaagcggggtatgtggctcgtgaaaaggacccgaatgatcgcaggagagtcgtaatcgtccctttgactgcttcgaaaaaacatataaaggatttgttccgtcctctgtctgagtcaacgatggatttgtgccgcgaatatacggaagaggagctggaactcattttcagttttgtaggcaaagccgccgatattatggaggaagagcttgaacgtctgaaacagtaagtgaatttgtgcatagcttggcccgttcccgaataaattgtacaagttacataagagaagggagtacgggccggtgaacatttttttgagctatattgtgctgggactgtccttgtctgcgcctgtggggccagtgaatgcggcgcaaatagacaaaggaattaaaaacggtttttggcatgcatggattttcggtttaggcgccatgacagcggatgggctgtacatgctttttatctatttcgggctgtcacagtttttgaccgctccatttgtgaaaacgtttttgtggctcttcggcttttttgtcctgacctataccggaattgaaacgcttaaaaacgtcagagaaccgatggatgtgcgaagctcgcgggggaaaccgtcatacaggaaaacattcgcatcgggttttctcatttcattgtcaaacccattgagcatccttttttggcttggaatttacggaagcattcttgcgaaaacagcagaggcctacaatatgaatcagcttctaatctatagctccggcatcatgatcggcattttaatctgggatttctgcatggctatcacagccagtacgttcagaaacctgcttcatgaaaagctattgagaggattgaccggaatcgccggtgtatccctccttgtgtttggcttttactttggttatcagggcatcaaacagttattgggctgattcatgaaggacagtcacctgccgcttccagttttaatatagtatccagatgatactggaggtggatcaatggtgaatgggatttacaccaaaagttttctggaacgtattcaggaagagcttcctgaatggcaaagaatcgcttttgagctgctggcagaaactctgggggacgacgcggatacgtttccgtgcattcccggacgccaggcgtttctgactgatcagcttcggattgcttttgccggagatccgcgggaaaaccgcacagcggaggaactggctccgttgcttgcggagtacggcaagatatcgcgggacacgggaaaatacgcatccctcgttgtgttgtttgatacaccggaagatttggcggagcattattcgattgaagcgtatgaagagctgttttggcgctttttaaatagactgagtcatcaagacgaaaaagaatggccggaagacattccggccgatcccgagcattataaatgggagttttgttttgacggcgagccgtactttcttctctgcgctacaccggcgcacgaggcgagaaaaagccgaagctttcctttttttatgatcacgtttcagccaaggtgggtgtttgaggacctaaatggatcaactgcatttggccgtaacatgagcaggctgatccgatctcgtttagaggcctatgatcaggctccgattcacccgcaattaggctggtacggaggaaaagataatcgtgaatggaagcagtatttcctccgtgatgacgaaaaacaggtatcgaagtgcccgttttcttatttaaagaacatgttcaacaaaatgaaataaatcaaggactggcagggcgatctttatgaccctgctttttttgatagatcatggtaacgatggcgatgatcacgagaaaacctatgctgacgaaaaaaccgggccggcttgatttttcaaacaatgtaccggacacagccgcagcaatcagaaccatcgctaaataaatttgcgtttttcccatgccctcgggatcagtcagctttttgctggagaacaggataaacagccaagtgtataaaagcataagccccgcagctgttgtcatatgctcataaatgtttttaggcagcactaacgacagaataatggagagaacaagccccgcaaacgtcagcccaagtgccggccagcatatttttttgccttcctttagagtaaagcatttcggcgcgtcgccgtcatcagccatcgtacaaagcaatgtcgtaaccgcaaatagcgaagcgacaagggtcgagaacccggcgataatgaaaatcccgttaaatatatcaaggatgatctcaaggttgtatccttttaacgacgtaatgaacgggctgtcctgttctgtaaacttgtgtaacggaaccaaaagcagagccagcccgattgaaatgatataaataatcgccagcgttgccagcatcagtttccctgatttagacgcttcctcaggtttttttaagtgaaccgccatcagccccatgacctcaatcccgccaaaagcgtaaaacgcgtagattaaacctgtccacagccccatggcgccgtatgggaaaaactcactcgtcttatttggaacatgtatgccatgatttccgccggacaggataccgcataaagccaggatggcaatgacaataaacataaaaatagcagctgttttaatgactgccagcacgttttctgttttttcaaagacggacaggccggtgaaaataataaggagccccagtactgcatagattgaggcaaacacccatagcggcacttgaggaaaccaatgcttcgtaaatagcgaaatggctgtcagctggcttccggtaatcagcatttctgatgtccagtacacccagccgttgctgaagcctgcccatttgccgaatgcttttcgggcatacgcacaaaacgagcctttttccggctgcttcgccgatagcttggcgagctgttcaaagacaaaatacgtaccgatccctgcgatcagaaatgaaaggagaacggaaaaaccgctttttacaattgcgatgctggaaccgagaaagaagcctgttccaatcgtgcagccgactccgatcagtgacagctgccaccaagccagattcccttttggctggtctttttttgtttggctcattatttattcaaccccttttatctaaggttagattgtgatctgtccaaagcttatatacatcggatttttgcctctttttacatggagaaggaagcggacgctcatactaatgaaaaaaggagcaaaccaatgacacagcaatatattgtggagccgaaaaaagggcttgggctgaagctgaaaaagggtcagattttaaaggtggttgatgtagaagggcagcaggtggctgattttgtcgcataccatgccaaggatttttatgaacaccttgatcagggagcgacgatagacgccaatcactccattcatgtgaaggtcaacgaccatctctactccaacctgtataagccgatgttaaccctgattgaagatacggtcggcaagcatgatctgctgttgcccgcctgccgtcctgatatgaacaggctcttatatgggaagcaaaaggatgagtttcaggatacgtgctatgacaatatgaaccgtgcgcttgagcagtttggcgtaccgaagcctcacatgcattacccatttgcgatttttatgaatactgtccttgatgagaaagggaatctgtctgtggaaacgccgctttcgaatgccggagattatgtaaggctcagggcggagatggatttaattgtcgcgttttcttcctgcccgattgaaaaagggaaatgcaatggcgacagtgtgacatccatacgggttgaagtcagctgatctctcttgttcactgtgaatgaagacctgtgctatatttaatagggatacataacagtcatgattcattttcattgatttggggaaatgatcagtaacaagggaaaatgtacaggaggaatgattgggatgagcatgcaggaaaagattatgcgtgagttacatgtgaagccctcaattgatccaaagcaagaaattgaggaccgagtcaattttttaaaacaatatgtaaagaaaaccggtgctaaaggctttgtattgggaatcagcggcggccaggattcaacacttgcgggaagactcgctcagcttgcggtggagagcattcgcgaggagggcggagacgctcaatttatcgctgtccgtcttccgcatggcacacagcaggatgaagacgatgcccagcttgctttgaagtttattaagccggataaatcatggaagtttgatattaaatcgacagtcagcgctttttctgatcagtatcagcaggaaacaggcgatcagctgactgactttaataaaggaaacgtaaaagcaagaacaagaatgatcgcgcaatacgcgatcggcggccaggaaggccttcttgtgttaggaacagaccatgctgctgaagcagtgactggtttctttacgaagtacggtgacggcggagcagacctcctgccgctgacaggcttgacgaagcgccagggaagaaccttgctgaaagagctgggtgcaccggaacgcttatacttaaaagaaccgactgccgatctgctcgacgaaaaaccgcagcagtcggatgaaacagagcttggcatttcctacgacgagattgacgattatctcgaaggaaaagaagtatcagcgaaagtatcagaagcgctggaaaaacgctacagcatgactgaacataaacgccaggttccggcgtctatgtttgatgactggtggaaataagttgaagaaagcccgctctcggagcgggcttttgtcgtgtacagaagctttatttgatgcggatatgattcagcttgaccattaatctgtcggcgaaccttcggaggctgcctctcgtatcaggatctaatgggagttcggctctcgcggcaatgttctctgccacatcctgaatcgacaggttgtctgtttgaatgtggtcctcaaaaatgggtgatgataaaccttcaatgcagcggtcaatttgtttggcggcccaggagttttttccttctgctctggtgcgcagcctttttaacaaggtttcctttgaagccattagtgtaaagtggtgaacgatcctgccttcatgcctgagcctgccgatgatctcattgaagtattcaggatgtacaatcgtcataggcacaataatgatgccgcggtatgtatctgtcagagaagctagaaaactgtaattgaacgcccgccataagggatagctttgaaaatcgtcctttgcgatctcctgcggcaccatggagcgcagcgcaaaacccattttctcgggatcatacacgtaagatgggtttagccttctgtgcagttcgaaggctgtttgtgtttttccggaaccgaatgccccgtttatccaaatgatcatcgccatttctcccttcctattcatcatacagaaaaagacccttcaatcgaagagtcagctggaaaaacaataaaggcggaaggttttaacgcttttttgcgtcgaagtattaaaatacctgcagaaatgttgtacaatgaatgtcattcaggcaaaaatggctaaacaacaaagcgcactttaagcttggaccggtaaagccggtatctatataaatattcgttaaataagcatataatgaagataaaatttcattccttaggaggatttcgccgaagatgaacgctaaacgagccatcccagtaagagaaagaaatatcgtcctgatcggattcatgggtgtaggaaaaacaacaatcggccaattggtcgctaaaaaattatatagagattttattgatattgaccaagagatcgaaaaggatttcaatatgacaattcctgagatatttgagaaaaagggagaagactttttccggaaaacggagaaggaatatattttagacatctgccatcataaacgattcaaagtcgtatctctgggcgggggatcttttaaacaagaagaaatcaggaattgctgtctggaaaactgtctcgtgcttcatctggacctgtcatgggagaactggaagcagcgcgcggatttattgatcgaaagccgccctgtactgcataaccgttcaatggatgaaatggaacagctgtttaacgaaagaaaagtcatttatgacaagcacaattcaaaagtggcaacagacaacctttccccggaagaggttgccgattacattgttgagacattaaaaattggctgggatctttatcagccgatgtaaaaagccgtgcgcagcgcacggctttttttatcgttttatcccttgtatcaaaatcgcttttaaacaaaaggagatgggctgtccgttttggttcaatgtaatacagaacgtgtcgcgtgcttcgtctgatgcgtgattcaagtgggtaatgatttgtttttctcggtcagcgggggttccgcctcgtttgatccagctatcgtattgaatcggcaagttccacttttggatgtcttgataggccagttgattggcgctgaacatcgactgccattctgataatgagctttctcgaacatgggaagggtctcgaagccggttcaaatgattgacaaactcatcaagaatgggatcttcaggcgcgtaatgatcaactaagagaaaacgtccgtcctcttttagtacgcgtgcaacctcgctgacagctttgcggacatctgaaaaatggtgggctgcgtatcggcaggtgatgatgtcaaatgaatcgtcggggaaggggagtgactctgccgttccttgctgaaagcgtacgttttcagctcctttttcttgcgcgaaggaggacgcaacctcaaccatctctttcgtcgcatcaacaccgatgcactcctgtacataaggagaaaatgccagggccgtatggccggcgcccgctccgatatccagcacccgatgctctgcccggcattccgctgttttgatcatcaaccccaaatcttccccctcggcaaataccttttcatcccgatacatctcggcgtttttagaaaacggtgtttcattagtcatttgaaccagctccttcttttcgtaaatgatgatatggattatgttagcaatttctgttatgattcgtccaagatataaaaatgatgaaaacgataggttcaacctatggaggctgaaatggatattaaagtgatggaatatgcagcggaaattgcccagcgccaaagctttacaaaggcggcggaacatcttcatatcgcacagccgtctctcagccagcaaatcaaaaagcttgaggctgagctagggcttaccctttttcacagatcccatggctctgttacattgacaccccacggcaggcgtttcattgaaaaagccgaggacatcattcgttccagagatgatttgcttcgggaaatgcaggagcgatcacagggaatcggtcataaattatccatcgggattcctgctgtaacagggagatatctctttcctccgctgctgaagcagtttttggcgcgctatcctcatgtggaggttcagcttgttgaaaaagattcggtttcattagaggagatgacggcaaagggagaagttgacctttctgttttatccttgcccatcgaggatgaacggctctccattatacccttgctcacggaaccagttgttctcgcagtgccgaaggaaaaacaaaggtggatgccgccggaaatggtcgcgctgattgagaaagcgctggaagaagatgagggacaccagccgtgtgtgccgcttgacatggtaaggaacgtgccatttattctgttaaaagaaggcttcggctttcgcaggacagttctcgatctctgtgcggaaagcggctttaagccgaatgctgcctttaagacaagccatattgaaaccgcccaatctcttgtggctaacggattaggtgtgacaatggcaccgaatatggtcagaagggataaagatccgggtgtgatctatttattgattcaatccgcgccatcacgaaccctcgtcttcgtctttttaaagaaccgctatgtcagtctgaccgcccaggcctttatggaactaacccgggaaagtcttaaacaaacgtttgatgaaggctgtctgggaaacaaagatgaaaatatttagaaaacaaagccgaaacgtggtagtataggaatacaaactaaatcttataaaacaaaggggaataatcggaaatgcaactattcgatctgccgctcgaccaattgcaaacatataagcctgaaaaaacagcaccgaaagatttttctgagttttggaaattgtctttggaggaacttgcaaaagtcaaagcagaacctgatttacagccggttgactatcctgctgacggagtaaaagtgtaccgtctcacatataaaagcttcgaaaacgcccgcattaccggatggtacgcggtgcctgacaaggaaggcccgcatccggcgatcgtgaaatatcatggctacaatgcaagctatgatggtgagattcatgaaatggtaaactgggcactccatggctacgccgcattcggcatgcttgtccgcggccagcagagcagcgaggatacgagtatttcaccgcacggtcacgctttgggctggatgacgaaaggaattcttgataaagatacatactattaccgcggtgtttatttggacgccgtccgcgcgcttgaggttatcagcagcttcgacgaggttgacgaaacaaggatcggtgtgacaggaggaagccaaggcggaggtttaaccattgccgcagcggcgctgtcagacattccaaaagccgcggttgccgattatccttatttaagcaacttcgaacgggccattgatgtggcgcttgaacagccgtatcttgaaatcaattccttcttcagaagaaatggcagtccggaaacagaagtgcaggcgatgaagacacttgcatatttcgatattatgaatctcgctgaccgagtgaaggtgcctgtcctgatgtcaatcggcctgattgacaaggtcacgccgccgtccaccgtgtttgccgcctacaatcatttggaaacagagaaagagctgaaggtgtaccgctacttcggacatgagtatatccctgcttttcaaacggaaaaacttgctttctttaagcagcatcttaaaggctgataaatgtgaaaagccgccgcatatcatcaggcggtttttttctgcaaactgccggaatgagaacagactggagacgaatagatatgaaacaaagaatcattgatgaattaaaacggatcgagcagtcatacggagtcaaaatcgtgtatgccgtcgagtcaggaagccgcgcatggggatttccctcgcaggatagtgattacgacgtccgctttatttatgtgccgaaaaaggagtggtatttttcaattgagcaggagcgtgatgtcattgaggaaccgattcacgatttgctggatatcagcggctgggagctgagaaaaacgcttcggcttttcaaaaagtcaaaccctccgctcctcgaatggctgtcctcagacattgtgtattacgaagcatttacgaccgcagagcagttaagaaaactgcgcacggaggcatttaagcctgaagcaagcgtgtatcactatatcaatatggcgagaaggaacgtcaaggattatctacaaggacaagaggtcaaaattaaaaagtacttctacgttcttcggcctattttggcctgccaatggattgaaaagcacggaaccataccgccaatggactttactgttttgatgaatgaacttgttgctgaacccgagctgaaggctgaaatggaaaccttgcttgaacggaaaagaagaggagaagagcttgacctcgaagcaagaatcaatgttattcaccaattcattgaaacggaaatcgaaagaatcatggaagcggcaaaagaactgaaggcagagaaaaaagatatgacacctgagttgaaccgtttgcttttgaatacggttgaagaagtgtggaaggatggaggaagctgatgttttttgtcgcttccttttctcctttattcgacagaatcccccccgactttctaactatctgattgtgacaaacccacaaaaataatcagaatctttgtattttgagaatattgtgaacgtcggttttgtccatttacaataaactcatacaaatacttcttagattgcggggtgttgaggttggaagtgatcacaagagattttttcttatttttatccaaaagcggctttctcaataaaatggcgaggaactggggaagccgggtagcagcgggtaaaattatcggcgggaatgactttaacagttcaatcccgactattcgacagcttaacagccaaggcttgtcagttactgtcgatcatttaggcgagtttgtgaacagcgccgaggtcgcacgggagcgtacggaagagtgcattcaaaccattgcgaccatcgcggatcaggagctgaactcacacgtttctttaaaaatgacgtctttaggtttggatatagatatggatttggtgtatgaaaatatgacaaaaatccttcagacggccgagaaacataaaatcatggtcaccattgacatggaggacgaagtcagatgccagaaaacgcttgatattttcaaagatttcagaaagaaatacgagcatgtgagcacagtgctgcaagcctatctgtaccggacggaaaaagacattgacgatttggattctttaaacccgttccttcgccttgtaaaaggagcttataaagaatcagaaaaagtagctttcccggagaaaagcgatgtcgatgaaaattacaaaaaaatcatccgaaagcagctcttaaacggtcactatacagcgattgccacacatgacgacaaaatgatcgactttacaaagcagcttgccaaggaacatggcattgccaatgacaagtttgaatttcagatgctgtacggcatgcggtcgcaaacccagctcagcctcgtaaaagaaggttataacatgagagtctacctgccatacggcgaggattggtacggctactttatgagacgccttgcagaacgtccgtcaaacattgcatttgctttcaaaggaatgacaaagaagtaaaaaaggagagattatcatgacaacaccttacaaacacgagccattcacaaatttccaagatcaaaacaacgtggaagcgtttaaaaaagcgcttgcgacagtaagcgaatatttaggaaaagactatccgcttgtcattaacggcgagagagtggaaacggaagcgaaaatcgtttcaatcaacccggctgataaagaagaagtcgtcggccgagtgtcaaaagcttctcaagagcacgctgagcaagcgattcaagcggctgcaaaagcatttgaagagtggagatacacgtctcctgaagagagagcggctgtcctgttccgcgctgctgccaaagtccgcagaagaaaacatgaattctcagctttgcttgtgaaagaagcaggaaagccttggaacgaggcggatgccgatacggctgaagcgattgacttcatggagtattatgcacgacaaatgatcgaactggcaaaaggcaaaccggtcaacagccgtgaaggcgagaaaaaccaatatgtatacacgccgactggagtgacagtcgttatcccgccttggaacttcttgtttgcgatcatggcaggcacaacagtggcgccgatcgttactggaaacacagtggttctgaaacctgcgagtgctacacctgttattgcagcaaaatttgttgaggtgcttgaagagtccggattgccaaaaggcgtagtcaactttgttccgggaagcggagcggaagtaggcgactatcttgttgaccatccgaaaacaagccttatcacatttacgggatcaagagaagttggtacgagaattttcgaacgcgcggcgaaggttcagccgggccagcagcatttaaagcgtgtcatcgctgaaatgggcggtaaagatacggttgttgttgatgaggatgcggacattgaattagcggctcaatcgatctttacttcagcattcggctttgcgggacaaaaatgctctgcaggttcacgtgcagttgttcatgaaaaagtgtatgatcaagtattaaagcgtgtcattgaaattacggaatcaaaagtaacagctaaacctgacagtgcagatgtttatatgggacctgtcattgaccaaggttcttatgataaaattatgagctatattgagatcggaaaacaggaagggcgtttagtaagtggcggtactggtgatgattcgaaaggatacttcatcaaaccgacgatcttcgctgaccttgatccgaaagcaagactcatgcaggaagaaattttcggacctgtcgttgcattttgtaaagtgtcagactttgatgaagctttagaagtggcaaacaatactgaatatggtttgacaggcgcagtaatcacaaacaaccgcaagcacatcgagcgtgcgaaacaggaattccatgtcggaaacctatacttcaaccgcaactgtacaggtgctatcgtcggctaccatccgtttggcggcttcaaaatgtcgggaacggattcaaaagcaggcgggccggattacttggctctgcatatgcaagcaaaaacaatcagtgaaatgttctaagcgggactaaatgggcatcctccctgcgggggtgtccatttcatccatatactataaaaaagaggaggaagtgccatagaaaacacacagctgattatttcgatttgtatttatatggcgggaatgctgctaatcggctactttgcttacaagcgtacgtcgaatctgacggattatatgctgggaggacgctctttgggtccggcagtaaccgctctcagtgccggcgctgccgatatgagcggctggctgctaatggggcttccgggcgccatgttttctactggtctgagcggcgcttggatcgtcatcggactttgccttggagcgtgggcgaactggctttacgtcgcaccgcggctgagaacctatactgaaaaagcggggaattctattacaattcccggattcctggaaaatcgcttcggagatcaaacaaagcttctcagactgttttcgggaattgtcattttagtctttttcacgttttatgtatcgtccggaatggtgtccggcggcgttttattcaacagcatcttggggatggattatcacactggcctgtggattgtgacgggtgttgttgtggcatataccctgtttggcggctttttggcagtcagctggacagattttgttcaggggatcattatgtttgccgcactcattcttgtgccgatcgttacgtttttccacacgggaggagcaggtgatacagttgctgaaatccgctctgtagatcctgatatgtttaatattttcaaaggaacgagcgtccttggcattatttctttgtttgcctgggggctgggatactttggccagccgcatattattgtgcgttttatggcgataacgtccgtaaaagagatcaaaagagcgcgcagaattgggatgggctggatgattttgtctgcagtaggcgcagtgctgaccggtttgggcggaatcgcttattaccatcagcgcggcatgacactgaaggacccagagacgatttttattcaattagggaatatcttgttccatccgattatcacgggttttctgatttcagcgattttggccgcgattatgagtacaatttcttcccagctgcttgtgacatcaagctctctggtagaagatttgtataagtcgatgttcagacgctcagcttcagataaagaactggtgtttttaggccgactggctgttctggctgtttcaattgtcgcgttggttctggcttgggagaaaaataacaccatccttggattggtcagctacgcgtgggcgggcttcggtgcatcattcgggccggttgtactgctcagtctgttttggaaacgaatgaccaaatggggggcactcgccggcatgattgtgggagcagcgactgtaatcatttgggcgaatgccggtctttcggactttctgtatgaaatgatacctggttttgctgcgagtctattatccgtcttttttgtcagcatattgacgcaggctccgtcacaagctgtcacagaccagttcaacgactaccaagatacaatgtcacaataaagatcgaaaggaggaggaaggggctgtccctttttcctcttttctccttttaagcggccatttttttcttttggaaacaaacgtatttttttctatacaaaaagaccccgtatggatatgattaaagtaaaaaaagtataggagaaaaaggtatggaagagcttttagagagagttttttcattttcagatgttgataagctgattgattttattagctatgaactgcaaaagccagtgatactggaaagcgcggatttctttttgttagcctataattcttactatattaaccattttgattctgccaaccagcagactattttttcgaaaaagtgtccggtccagatttttgagaggtttctgaaggacggaattattgaaaaattgaaaacagagcctgagccttttcgcgtcaataaaattgaaagcattgggttaaaccagagggtggtcgtgagtgcaaagcacaaaggggaagtcatgggctacatctggattcaggagctggaccaaaatctgacggatgaagagctcgactttttgtacgagacctccttccatgtcgggaaaatcatttataaaacgaataaattgaaacaggaaaaggaagaaaaagcagaggatctcatcaaacgggcgatctatcagcaatttacctctgagaaggaactcagacgggaagctgaaaggatcaacaccgtgctgccttccatgttttcagttgttatcctgcacgccgcaaatggggatggggaagcggttgaggatttaaaggaaaatatcaggtcgtacctgaatttacgggataaggtcagtcatgtcttaacgatcgaatcaaacattgtcatcgtcgtagcgagtttttcccaaaaaagctccgtctcctcagcagcttctgagtttattaacaagctgttaacacattttcactttcaaaaaatacctacccctatttatatcggtatcggaaacgaatataatcacctattaaaacttggcaagagctacacagaagcacttgaagtcatcaaagccgcagaaatcaccggcaatcaggaaaacattccatatgaatatgccaaactcggcatttaccgctatttagaaagcatcgaacagaaaaatgaatttttagaatacgagaataaagatttagctttattaaaagcaaaagacgaagaaagcagcactgagctgctcaaaaccttggaaatctatctcctcaacaactgcaaaacaaaaccagcggcagaacagctgtttattcaccaaaatacattgaattaccgcatcaaacagattactgagatgacgtcgatcgatttaagcgatttcagaacgcggtgccagctctatctcgatttgatgctgatgaaaaagaaataaaaaagaaaccagtacttgtactggtttcgtcttcacttaaaatcctctgtaaacatacggatcatcaggttttttaatggtattccagtcagttactttgacgacagggagagttgacttgaatggctggtaatactctgaggccagagtgcccttaatgtgaatccattcatcatccttgatgtccatgtccttcggaaattccacaagcatcccgtacacgccggaatcagcgatacagtgaatgatgccaaaccttaatacgaacagctgatttttgttaattgcgtttcctttgtaagcaaatccatggaattctatcgtccgtccgagaaattcacccggatagttatagatggtttccattccttttaggaaatcgtcatcggtcagagaaatctcttttttgctggaatacttattaaacagctgtttcatttgtttgtcatagctgtcttgcgcgtaataaaggctggcatcaggccgcaaatactgtgtttgggagtaatgatctccgctctccatcgccttaaacgagaacccttttgttttgacaatggatgagtcaagcgttgcaatcgggaagaagatgcctgacaccaaaggaaaaagaaaaacaacataaatcaaataacgctgataaaatggcttgttttgttcatggtcatgctcgtgatcatggccgcacccgcaatcatggtgacccccgcttttttcaggcgacttgataaatagatatgcttggacggcggtcagaatagccagcaggaaaatcgcaataaaggatagataggaatatttcatattgatatattttgttagatttcctgaggcatgcagatgataaaagaaaaacgtaaatcccatcagcaccaataaacgaaacatccaatcacccctttaccagtagtgatcccgctaaaacaatcacgacaatatatgtaatcagcaggaaaacaaatcgttttttgaaggctgcaagcatcatcaatagattcttaatatccaccattgcgccaaagacgagaaaggcgattaacgatcctaatgaaaatgtgctgctgaaggaagacgcgatgaacgcatcaacttctgaacaaagcgacaggacaaacgccagacccatcatcacgagggaagaggatacatcattctgcccgatcgcaagcagagtggatgttttgacatacgtctgcatagcggctgcgataaaggcgccgatgattaaatatttccccacggagaaaaattcatcaatggcatgccgcaaggtcccgcccagtttttggagcaaggtgccgtgatgatggtggtggtgcccgggttcatcaggctttaaaagctggttatctttaaattgataggataaaatgaccccgatgatcagcgaaacggcgagagccagtccgcctctgtaaaagaccacgctccatctattcccgaacgcaatataagtagaaaataaaacgataggattaatgataggcgcggtcagcatgaaagcaacgcccgcatgcagaggaactccctttaacagaagccgcctcgtaatcgggatgatgccgcattcgcaggcgggaaataaaacgccggccagcgcaccgaataaaacggcgagaaaacggtttttcggcatgattcttgcaatcatttcttcagaaacaaacatttgaatgattccggaaagtatgacgccaatcagaataaacggaatggcttctattaaaatgctgataaaaatagaattcagctgaagaaaagatgattgtgctgtcacaataaaacctccgctcatgttaagctgcctttcttatgataccagaaaaaaaggcactgcttgtttgacggaggaagggaaaggatcgtttcactttggttaggattccaaaaaaccgagtaggatactgtctgtttctgcagcttcttttccgagccaaatcaggtgtccccatgagtgaagcaaacagagaacagcgccacgaatgtgctcttttgcatgatgtgcatgtgacaagtcaaccaatccatcataaacactttgcataatcagcacgggacatatgatggcttgcaggtcttttaaagagacagcggcggtttgtgacaagtcaatcagaaatccttcacccgagcgctgccggctgttcattttccgaaatgcttctatgtctttttcattcatcaaggacttgattcgctgaaacggaagcgtgctgaattgggggctcatagctcgaaacatcaaacgcgggaaagcgttattcaaggaagaaatcagcttccatatccacttttctaccggcgggcggaagagaattttccccaatttatattcagtgtcttttggggtgagccactctttggtgactgcggattgcagggtcaatgtatttactcttttcggataatgtgaggcaaagcatatgccgctcggccctcctgctgagatggcgatcacatggacactctcgatttgtagatgatctaataatttcacatagaaacggcaggcattggcaagactttttccaatttcttttgacgtccgtccatagccaggccttgaaggcgtaatgatggaatacccttgctcaatcaacgctgtgtatccgtattcctcgtaacaatttgaatgcccgccatgcatgacaaggatcggagttcccttgcctgtcacagaatattctagtgtactgccatcgaaggtgatcgtttcgactcgtcttttcatctgttactcccatttgttttttgcctattatagggttttcagcaattgaccacaaggtgaagaaatgaataaacacaagctcgtgaaatatgatatactttgtattgatattcattctcaattaaaatgatttgatatagatgtgaacgggaggcaggacggatggctgagaatcaagaggtatatgacgttacgataataggcggggggccgatcgggctgtttactgctttttactgcgggatgcgggagctgaaaacaaaggtaatcgaatttttgccgaagctcggagggaaggtgtctttattctttcctgagaaaatcattcgcgatatcggcggcataccggggattgcgggaaagcagctgatcgagcagctgaaggagcaggcggcaacgtttgatcctgatatcgtattgaatcagcgtgtgaccgggtttgaacgcctagatgacggcaccattgttctgacgggttctgaaggggagaagcactatacaagaactgtgattttggcttgcggcatgggtacacttgaggtcaatgagtttgacagcgaggatgcggccagatatgcgggcaaaaatcttcattatggagtggagaagctcgatgcgtttaaagataagcgcgtggtgatatcaggcggcggagatactgcggtcgattgggctaatgagcttgaaccgattgcggcgtctgtgactgtcgttcatcggcgtgaggaattcggcggaatggaaagcagcgtgacgaaaatgaagcaatcatcggtgcgggtgcttacgccttatcggctggagcagttgaacggagatgaagagggcatcaaaagcgtgaccgtttgtcatactgagtctggccagaggaaagacatagaaattgatgagctgatcattaatcatgggttcaaaattgatctcgggccgatgatggagtgggggctggagattgaagaaggaagggtgaaagctgacagacatatgcgaacgaatcttccgggcgtgtttgtggcgggcgacgcggctttttatgaaagcaagctgagattgattgccggcggatttacggaaggcccgacagcggtcaacagtgccaaggcttatctggaccctaaggccgagaatatggcgatgtattccacccatcataaaaaattggtgcataaataaaacagcccttgggggaaagggctgccagccatcagctgtgaaggagctttttctgcgtctgttgattctgaatgaaagctagcaattcatcctgttcttgtacagctgtgaatccataagcttcggcagctgagtcatcgcctatacagacgatagggggccggcttgctgacaattccggcgaaatgccaatttgttcgccaccattgatcaattgctgaacggacagcttgttcgggcaaatgaccatgtgcagcggggattcactgatggtacgctgaatcatgtgggtgaaccggtcatctatgacgttttcatgagtgatataaaacgaacaggattcatgcttttgcatgttttccactgcatggcggctcccgacaacaagacgtttctctgaatcaggctgaatggcggtgacaagaaagccccgtttctcaagctctgtctttgcttgctcagatgctgcactcagtttggctgtcagctggcggatgtcgattttctgagaagccagtgctctgaaaaattcacaaaccgcccggcgcgatgtgaaaaaaacgtcttcaaaggtgccaatctttcgaagaatttcttcattgacaggcatgttttcggtccgccatttcggccactcgatgagatcggcgccggaatcgcgcagcttgtctgcaagcgggtcttcatcttcgccatgagtcacaaccatcaaatgccgtccgatgagcggtttgctttcaaaccagctgtgtgtttgaaagttgacgatgtctccgatgacgataatcgcagggtttgtaatctggtgttcctgcactttttgctgaatgttctcaagtgttcctttcacactccgctggcggccccacgttccccattggatgacaatgacagggacagaaggcgatttcccgtatgaaataagctgctggcaaatataagacaagttcttgacacccatgtaaaaaacaagggtttgaacgcttcgggccagcccttcccagtcaaggttcggcgtgccttttaatgatttatcatgcgctgtaatcatggcaaaagacgatgcaaaatcccgatgcgtgacggggatgcccgcatatagcggcgctgcaattccagaggtgattcccggcaccatttcatagcgaatgccgtgctcatgaagagcatctgcttcctcgccgactctgccgaatacgctcggatctccgcccttcaagcgaacgacggttaacccatttaatgctttttcaaccagcagggcgttaatttctttttgtttcataaaatggcggtttggcagttttccgcaataaataaactggcagtccggtgatgcaaattcgagcagcttcgggttggcgagccggtcatataaaatcacatctgcttccttgagcgcctgttttcctttgatggtgagcaggcctgggtcgccgggtccggctcccacgaaatatacgattccgttcttcatgatcatgtcatccttccgtcactgtaaaaaatgaaggaccactagaaaagtgatccggtcttttgatcaatatacgagataaacatgttctccttcgatcagcgtttcatatgttttgacgcatccgtggtcaggttcttggacgattccgtcttctaaggaaattttccagtcgtgcatcgggcagaaaacatattgaccgctgacgatgccttctgccaggacgccgcccttatgcggacagcggttttcaatggcgcggatgcttccgtctgaaagcttgaaaaccgcgagctccttatcttcaatatacactgttttgcctaattgttcaggcaattcttcaatttttccgatacatacttttgttacgtctttgtttaccatgtccattcctcctcaatgatagtttttgtcattatgatgtggtcacgacattttcaaataattctttagaggtttgtttatcctctaaaaagtctttccacggatccttgtggacagagagtgtttcattcattcggccgttcagctcctgccgcttttccggatcgtttaacacggattggacatgggataaaccgacgcgctcaagccatgcggacgtacgctccagatagtttgcggtttccctgtaatattgcaggtaagcgcctgcgtattctaagacttcttcatttgttttcaccttcatcagcaaatcgccggcacgcaagtgggttccgccgtttccgccgacataaagctcccagcctccgtcgatgccgacaacgccaaggtccttaatgccggattccgcacagtttcgcgggcatgcagacacggccattttgactttgtgcggcgtgtttagcccttcgaattttttctcaagcgcaatgcccagtgccatggagtcttgtgtgccgaagcggcagaattgctcgcctacacatgttttcactgtgcggagcgtttttccgtatgcgtagcccgacggcatatcaagatcttcccataccttcggaaggtcttcttttttcacgccgataagatcaattcgctggccgcctgtcattttcacgagtgggatctcatatttgtcaacgacatcggcgatcttgcgcaaatctgtggagttggtcacgccgccgtacatccgaggaacgactgagtatgttccgtctttttgaatattggcgtgcattcgttcattaacaaagcgggatgtccggtcatcctcgtatttggttggattgatcatgcctaagtagtagttcagagccggccggcatttggaacagccttctggcgttttccagccgagcacattcatgacttctcttgtatgtgacagccctttggctttgatttcttctacgacttcatctcttgacaatgtggtgcagccgcaaatggcttctttttgcgctgacgcatcaaagtctgatccgagcgtatgctggaggatttcttctacgagtggcttacagcctccgcatgagcgggatgcgccagtgcatgctttgatctcgtccgttgacgagcagcccttttcctgtatggcttgaataatcgcaccttttgacacgccgttacagccgcagatgatttcatcgtcgctcatcgctgcggtgatgcttgtgcctgcttcttggttgagaggctgtaagattgatattttagaggtttcagagatatcggcttctttttgaatcatagaaaacaggcgattgccttcgctgctgtcaccgaataaaacagcaccgacaattttgttgtctctcaggacaatttttttatagatgccgtcctgctcatcgaagactttaatcgcttttttgtcctctgattcatcaaagtccccggcagagaaaacctcgacgcccgatacctttaactgtgtggagagaacggagccctcatacgggtttgtttcgatgccgcaaatatgcttcgccagcacttttgcctgttcatagagcggcgccacaagcccgtaggcgattcctcggtgctcggcacattcgccgaccgcgtaaatgtgcgggatttcagtctgcatataatcattgacgatgatgccgcggttaaccggaatgccgctctcggccccgagcgttgtatttgggcggatgccgacagccatgacgactaaatcagcttcaatgcttgtgccatccttgaatcggaggccttcgacacggtcgtcaccgacaatttcttctgtttgcttttcaagtaaaaaggtcataccttgtttttctaactcgttttgcagcaggcgtcctgccgttgcatcaagctggcgctccatcaggaatggggcaaggtggatgacggacacatccatgccaagattcagcagtccgcgagctgcttccaaaccaagaagtcctccgccgatgacggcagcttttttatattgttttgacgcggcgagcattgtgtctgtatcttttatgtcccggaaagctgtgacgccttttttgtctgcgcccggaatcggaaggataaaagggaccgagcctgtcgccaggatcaattcatcgtaaggctggattctgtctgcatctgtgatgactgttttgttttccgtgtccactttgatgactgtttcatttgtatacaattgaatgttgttttcttcgtaccagtcccaatcgtttaacgtaatatctttaatatctgtatcgccttgaagcacttttgacaaaaggattcggttgtaattgggatgcggttcggcaccgaaaattgtgatctgaaactcgtctttagcaatactcagtatctcttcaatggcccttaccccggccattccattaccaacaagaactagctgtttttttcccatcagatgatccgctccttatcaatgttttttccagcgtagcacagcaaaaaggaatatttaagatacatgttataaaatgtaacaaaatatacgaaaagttctaaaaattttatgaaaaatttaaataggtctgattcggacggcgcataccttaaaaccgggcattttacaggctggatctaaggcttccccgattaaatcattcacattttgagcgtctgcccaatggatgggaacaaaaacagtatcttttctgatttgttctgataatttgctgcggacggtgatgcttccccgcggcgattctatttttaccagtacacggtcctcgatattgtaggtcgctgctgtttgcggatggatttccataaacgattcaaaatgtctcgcggcaagggcggcgctttttcttgtttggacgcctgttaagtagtgagacatgactctgcctgtcgttaaataaagcggataatcggctgtcggcttctcttttggaacaggtggttcgtttggaatcacacttaatgccgctttttgatccggatgagcaaatgattctgtaaacaagcgcccagttccgggatgatcagattccggacacggccaatgaatgccgccttcacgtctgagcctgccgtatgagatgcctgaataatcggcaatcccgcctcggctcgcttctctcaattcattaaaaatatcctccgctgacgtataagaaaagtagcggcccttgccgagagcggatgcgagatcacaaatgatctgccaatcatgctttgcttcgccggggcatggccggcttgcttctcttaatgtcacgcgtccttctacatttgtcatggtgccttcatcttctaagtaagaggaggcaggtaaaatcacatctgcgtatttcgcagtctcagaaataaacaaatcgattgcaacaaagaatgtcagtttccttaaagcctttttcacgagattcgcatttgggctggagacagcaggattggagcacatgaggaacaatcctttgatgtcgccgtcgttgattttttccatcatttcataggctgagacaccttttcgcggcagatcatcctgatggattccccacactttcgcaacatgtgcccggtgttgttcgttttcaatagatcgatagcccggaagctgatcggctttttggccatgctctcttgcaccttgcccgttgccttgtccggtgatcgccccgtaacctgagtaaggcttgccgatttttcctgtgatcagcaccatgtttaagaagcctttcacagccgctgttccatcggtttgctgttcaatcccgcgggctgtaaacagcatgccggacgtttccttggcaaactttacagccgcttttcttatatccaccagggggacactcgtctgttcggcgatgtcattcaggtccaacgagtcagtatgctgcttcagctcttcgaatccatttgttcgtgattgaatgaaatcctcgtttataagctgttcgtcgatgatgattttgacgagaccgttggcaagggcggcgtctgtgccgggtttgattttcaaatgaagatcggcgatttttgttgtcgctgtttcacgcggatcaatggcaatgatgtaagctccgttttctttcgctttttcaaaatatggcataatcgtaggctggcactccgcgatattggtgccggccagaatgatcacacgggtgtggggaatgtctgataagggattcgttaagcctctgtccgcgccgaatgtttggttggctgcggttgctgcggcggacatacaaagcctcccgttgtagtcgatgtattttgtctgtaagcccacccgtgcgaatttccctaacaaatacgcctcttcatttgtaatcgaggcgcttccgtataccgccatagcgtcatggccgtgttctgcttgtatcattgtcacttggtctttaatgtaattcagtgcttcttcccaggaaacaggcataaactcgccgtttttcttcagcagcggccgggtgatgcgggaggagttcagggcatgctggtgggcgttcatgcccttcatgcatagccgaccctgtgttgtaggattatcaatcccgatcgcagtgtactttttgcgcgtgacgatggtttgttccacgagctgcattttgcactgcatgctgcaaaacgggcattgagtgtcatatgttttttctgattggacgtcttgctgtttatcacggaaatatctaagcagtcgttcagtcaaaatgcctcatcctttcttatatgcacccgtctctacagtcgggttttgaatcagtgacagatctgtttggaggctttccagcagctgtgcccttaggtcttcttcgaatagcacttctctgatatgaacgatcccgagacggtctatccactgatgaacaccttctaagtaatgagccgtttcccgataatactggatcagtcctttgatcatgccggcagtgctgtcttcgttctcagtcacgcaaaacaaagctcctgaacgggcatgagttccccggacgccgccgatgtgaatgtcccagccagcttgtctccgaattgcgccgacatcttgcagggcggcatcggtgcagtctgtttcacatgataagctgatagaaatgggagcgggtaagggaagcgtctcaagttgtctttcgatttgggctgccagctgctgaatcgatcgattttgcccgcatgtacatgctttgatgctttgcagcgtgtgtcggtgttcattggtgtaaacgggcattttcagatcttttttcatgttcgggagatccgcaggcttgatcccggaaagcttcagcctttggccgtgagtgatggatacgtcgggaatgctgtatgcctcaatgatgttggcgatggttcttagctgctccgcgtttgtccgcccgccgtacatttgcgggatcaggatgcatgtctcttcagtggctggctcaggctggacaaacccagggtacagcatttccagatagtattgaatcgcaggaacacaagtactgcatccgttttttgttttccagccaagctggttcatcacttctgccggattagtgaatggcctgcgctgaagctcagcgatgatgtcgtcttctgtaaaatcagtacagctgcaaaacgaaggtgtgccggcgggcttcgtatattcgctgttggtcatgtatctcaaaaggtcttcaacgagcggtttgcatcctccgcaggacccagtggctttggtgcagtgcttgacttcctcaacagttgttaagcttttcgtgtacaccgcgtcttcaatcgcgcctttcgtcactgtgttgcattggcaaatcgtttcactggaaggcatggattcaaataaagggccgcttgtctccggttcgatgatctgctttttgacaatggagatgtctcgttgtttaagcaggctgtcgagaagccgctgcttgtcatgggtgtctccgaataaaataacgccggccagtttgtcatctacaaaaagtgcttttttataaacgcctgcttgttcgtcgtagattttgatgctcgtcgtgcgttcatcctcttggatctttcctgctgaccacacatcgattccagctatttttaacgccgaagatggtgctgagccttgatattcctcacatggaacgccgcaaatatgactggcgagaacttttccctgctcataaagcggagccaccaatccgtacaccgttccgttatgctcagcgcattcaccaacggcgtagatattcggttcgcttgtctgcatgaagtcattcacgatgatcccgcggttcactttgattccagcagatacagccaattcaatattcggtttgacgccggccgccatcacaatcaagtctgcttttaatgaagagccatctttaaaatggattcggtctgccttcgtggcgccggaaatggagacggtgtctttctccaaaagaaaggttaggcctttttgttccagctctgtttgcagcagccgcgccgctgtttgatcgagctgtttttgcataatgccggcggagtggtgaatgacgctgacattcataccgagatgctgtaaaccgactgcagcttccagtcctaataagccggctccgattaccgcagccttttgaaagtgctgggccatcttcatcagtgcttggcagtcttctattgtccgaaatccatagacaccttttttgtctgccccggggatagggagaatatgaggggaggagcctgttgccactattaatttgtcatacgacagagtgcgtttccgatctgtgatgacctgctgctgatctgtatcaatttgaataaccttttcgcctgtgtaaagcgtgatcccgttcttgtcgtaccaatccttgctgttcagtgtaatgtcatcgagtgacgcttcaccctgcaatacagaggataagagaatgcgattgtaattgggatgcggctcgcttccgaaaatgacaatctcaaacatgtggcgattcagctttaatacttcttcaatacagcggattccggccatgccgtttcccgctaacaccaatctttgtttcttcatgtattagacctcctttggcgaagctcgtaagttttctcctattaaaaattatgtcacaatgcactgttaacgcattaaacgtgtcacaaaaacttacacatgtcttttccagaaaataatggtcctatatccttgattcagaaaatgtaaaataatgagggtctagaaaggggaatcttatgaagctgtcggaactgaaaactagcggtcatccactcactttgctctgttcctttttatactttgatgtcagttttatgatatgggttatgcttggggcgctgggtgtttatatttctcaggattttggcctgtctccttttgagaaagggcttgtcgtagctgtgccgattttatctggatcagtgtttcgtatcattcttggtattttaacggatagaatcggaccgaaaaaaacggcagtgatcgggatgctggtgacgatgattccgctgctttgggggacattcggcggccgttccctgactgagctgtatgccatcgggattctgcttggcgtggcgggggcaagttttgctgtagcgctgcctatggccagccgctggtatccgcctcatttgcagggacttgcgatggggattgccggagcggggaacagcggcacgttgtttgcaaccctgtttggccctcgtctggcagagcagttcggctggcacattgtcatgggaattgcgctaattccattattgatcgtctttattctttttgtatccatggcaaaggattctcctgcacagccggctccgcagccgctcaaaagctatctgcatgtgttcgggcaaaaggaaacatggtttttctgcctgctgtacagcgtcacatttggcggatttgtcgggctctcaagctttttatctattttctttgttgatcaataccagctatcaaaaattcacgcaggggacttcgttacattatgtgtggcggcggggagctttttccggcctgtcgggggcttgatttcggatcgtgtcggcggtacgaaagttctttctgtattgtttgtcatcgtggcactgtgtatggccggagtcagcagcctgccatctctctcaatggtcattgttctattgtttgtcggaatgatggggctcggaatgggtaacggtgcagtattccagctcgtgccgcagcgttttcgcaaagaaattggcatggtgacgggaatcgtcggtgcggccggaggaatcggagggtttttcctgccgaacatcttaggatctctcaaacagatgacaggcacatatgctatcggttttatcacgttttcctgtatcgcgctgctggcgtttgcacttgtgcttgccgcaggctattactggcggaaaagctggagcgcggaaagcagcccggcggatgtttaggattttgacggacacgcgtttgtgcgtgtcttttttattttctcttgattttcaacagtgaaccgatcaaaataaatagtaattattacgatttgttagtgagaggagttttctgaatgaatcaacatacgctgctcccgaaaaaaacggagcgtcttcaatactttggatcggtcagtccggtcaaaggcgagaaaccagtggaaaaagagaaaatgaaggacctgcaaaatatcaggaaggattatttttttgacattcagcatgtaggtgtcgctaatgtgtcccatccagtcacaatcacttctgccatgatgcctgccgagcaaacaacggctgcgaactttacaatgacttgtaatttgccgagaaatcagaaggggattaacatgagccggttaacagagctgctgcaagtctatcatcaaaatggctggattctctcattttcctctcttcagcaatttacgaaagagcttgcagaaaacatggacacatcatctgccacagttgaagtgaggtttccgtggtttttcgaacggaaaagcccgaagcttgagaaagcgggtttgatgcatgctgatatattcatgtctgtcacctatcacaaagatcagccgtttaaacagcgtgccggcatctcagcaaaagtaacgactctgtgcccttgctccaaggaaatcagcgaatacagtgcccataatcagaggggaacggtcagcatttgggcggatattcacccggccgcatcgctgccaagcgatgttaaagctgatttgcttcacgccgcagaatcaaatgcttctgcgagactgcatccggtattgaagcggcctgatgaaaaagccgtgacagaaacggcctatgaaaacccgagatttgttgaggatctcgtccggctgattgctgctgatttgtttgagcttgaatgggtgtcggcctttgagattgaatgccgcaatgaagaatcgatccatctccacgatgcctgcgcgaagctgcgtttttcgaaggaagtggataaaatatgaaactctcattattcattattgcagttcttatgccagtcagcctgctgtcagcctgctccgatcatgcagaagaacacgcaagtatcaatacaaagaaaacggtcgaaaacataacggacgttcgaaaaacagcaaaaacaagcattgattggacaaagccttcgggcggagaatacccggatattaaacagaagcatgtctggattgatgtgaatgtgaaggagcagaaggcttacatcaaggaaggaagcaacaccatctatacaatgatgatctcttctggtcttgatcaaacaaaagatgatgctacgccaaagggcaccttttatgtagagcctgaacggggagaatggtttttctccgaaggataccaggaaggcgcagaatactgggtatcatggaaaaatcacggtgaatttttatttcatagtgtgccaatgactaaggatcaaaaagtcatcaaaacggaagcagaaaaactaggaacgaaagcatctcacggatgtatcaggctgaccattccagatgcgaaatgggtatatgaaaatatccctgaacatacaaaagtggtgatcagctgaattgaaaaccgttgacaaaaaggaaaaaagaccatacaatttaaatcgtaacaattgcgttttatgataaatggcttatcattggctgtatctgtgaaaagcggaaaggctaaggatcttgctgtcattgatccccatgaagcgtctcttgaaaactggaaacgaaacccaagctactttctgatgagatatttgcgctttccatcggttcagcaacgcaagtggagcgattgctttatgcaagctgcggttttccgaatgtcggcaaggatttgcgatggggaaaaggattaaacgcggttgaagcctttactgatttagaaaccgggtggcagcgagaaatgagcgcgaaaagctgctctacactattgtacatatggcgaagtatacaatttaaatcgtaatcattctattttaatggaggcattattatgaaaaaaattccggttaccgtactgagcggttatctaggtgcgggaaaaacaacattgctgaacagcattctgcaaaatcgcgaaggcttgaaaatagcggttatcgtaaacgatatgagcgaggtgaacattgacgcgggcttggttaagcaggaagggggcctttccagaacagatgaaaagcttgtggaaatgtcaaacggctgcatttgctgcacgcttcgcgaagacttattaattgaagttgagaagctggcaaaagacggacggtttgattatatcgtcatcgaatcgacaggaatcagcgaaccgatcccggtggcccagactttctcttatatcgatgaagagatgggaatcgatcttacaaaattctgtcagctggatacgatggtgacagtggttgatgccaaccgtttttggcatgattatcagtcaggcgaaagccttctggaccgcaaagaggcattgggggaagaggatgaaagagaaatcgccgacctcttgatcgatcaaattgagttttgcgatgtactgatcttaaataaatgtgatttggtcagcgagcaagagctcgaacagcttgaaaacgttcttcgtaaactgcagccaagagccaggttcattcgttccgtcaaaggaaatgtaaaaccgcaggagattttgcatacagggttatttaacttcgaggaagcgagcggatcggccggctggattcaagagctgacggcaggccatgcggaacacaccccggaaacagaagaatacggtatctcttcatttgtatataagagacgtttgccgtttcattctacacgattttaccgttggttggatcaaatgccaaagaacgtggtacgtgccaaaggaatcgtctggtgcgcatctcataacaaccttgctttgctgatgtcgcaagcaggtccgtcggttacgattaagcctgtatcttattgggtggcggcgctgccgaagcttgagcaggagcaagtcaaacagcaggagccggaaatcctggaggagtgggacccggagttcggcgaccgcctaacgcagctagtttttatcggaactgacctggatgaagaaacgatcacgaaagagcttgatcaatgcctgctgactgaatatgaatttgattccgactggtcgctgtttgaggacccgtttaaatggaagctgaatcaatagaaaaaaagccgtcccctggggagcggctttttttaatgaaacgtttgtttaaacataatgagcgtattttttctcaaggatattctgaaagaccgcggcaatggagcagatggcccaataaatgagagcggtcagaatatacatggtcatataatcaaactctctgcccccgatgattttcgcatgctggagcaattccggcactgtaatcatcgcagcgagagatgatgccttgattaagtcgagcaatacattggcaagcggaggcagcgcaatacgtatcgattgcggcaaaatgatgcccctcatcgtctgccaataggaaagacccagcgaggatgcggcttcccactgtcctttttcgacggatgaaatggctgaacggttaatttccgcaatgtaggcggcgctgtttaggctaaagccgattaaagcagccgtgacagcggaaaattcaatgccgatataaggaaacccgaaataaaggataaacaaaatcaccaaaatcggaacgccccgcataaatgagatatagagcttcgccggccatcttaacaaagcaagcttagacattctggcgagtgatatgaacaggccgatcacagttcccgcaaacatgcttacaaaagagataagcagtgtatacccaatgccttttatgacataagggaacgattcaatagccagcttcgtgttgaaaatatattcccattgaatgctattgatcatggcgtccgattacaaatcaacgtcctgaacgtcggcatcaattttttttgatacatctgctttattgaagaattgtttcgacagtttagtcaaagagccatccttgctcatctctttcaatgcttcgttcatctttttctgaagtgccgcattgctttttttcatgacaagggcctgtttgttcggcatgtacttgatgtcaggatgaattgttatgttgagatccgggaatgccgcgagcgcaagtgtctgcaggtaatagtcgtttaaaatgacgtcagtgcgtccgttggcaacatcttttaaatattgctcattcgtcgcattatcataaatcacttctttggcgccgtattttctcgcgacctccatgtagacggttgtagccgcgccagccgctttcttcccttttaaatccttgagcgttttaatccctgataaattgtcttttcggacaattgccgtgccgtatgaatatttataaggagtagaaaatgcgaacttcttctcgcggtccttcgtcacatcgatgtcattcgcggctgcgtcaacctgtccgctgtttaccgctgtcagcatcccgtcaatgcccatctccttgaactcaaccttcaatcccaggcgttttgccgcttcacgaacgacttcaacctcgtagcccgtcagcttatcagagccagagtcagtatcgtgataagaagtgggataaagcgtgcctgatgtagcgactacgattttccctttatccttaatctgctcccagcctgtatccttggaatcggcttcatttttgccggaacaggctgccaatataagaaagaaagccattgtgaaactgaatataacggctttggaatgcatgaatgatttcacctatagttcccccaatctgttaatcaactaaaaagatagcattgaacataaggggttgcaatatgttgatcgcgttttcaaaaagttcgaattgtgtatacaaaaggcatgggtgggtgattaaaagcggctatgaagggaattggtgatgaacaaaggagttgtccaaggatgaatgcccgacgtaccaaggaaacacatgtggacgtgaaggatgcagtagatccgttattcctctatgccaataccgtaagaaatggtcagaagcatgaaatcgatcttcagaataaatttaagtcttgctgatgcccctaagacatatgatatatccgatgagaaagaaaatggaaacatttaaaccataatggggagtcaaatgaatatttacaaaccagccggattttggatcagacttggagctgcattgttagactatattatagtctccgtgccgcttttgctgatctattggctgattacaggaaaagacccaaacgacagcatgttcatcagtttggttgttctgctgtattctattttgctgccggtgttttggcgcggttatcttatcggaaaaaggatctgcggaatcagaatcgtaaaaaaagacggatcacaggtcagtctgttaacaatgtttttacgggttattgtagccggcctggtttacgttataaccttcggactcggcttgatcgccagcctgattctgattgccgtacgagaagacaaacggaccctgcatgatttaatcgcgggaacatcacttatgcgaccaggtgaagaagaacttaatgctgacgaagagattagaaagagcgaataatggttcgctctttttatttttatgcataaaaaatacaaggcagcaaaacatatgaaaaataggattggaggaataaactggatgaaacgaataaccatcaacattatcacaatgttcattgcagcggctgtcatttctctgaccggtacagctgaggccgctgaaaaacagcagcagtctcccgcaaatgttacactgacagatcagcaaaagaaagagattgaacaactggaagcagagattcttaaaaagcgcaaagacgtgatctcaaagtatgtacaatacggtatcctgcctaaagaaagaggagaacacatcaaaaatcacttggacaaacactttgaaatgatgaaacaaaacggctttgttccaaagcaccatcctcatccgcataaatttgaaaaaagacattaaaatggaaagcatccaatgggaattgggtgcttttttattgttaaaagttactgaatgaattttccggaaaaatatatcgcttttgttgattatatcttataataagatataaatggggtgtataatgatggaaatggatttaatctctaaacttaatcagcagtggacagatatttattatttattacattatcaacataaagataatatttctcaccaggcaatacggattatgcagcatattgaaaagcaaggtgaggcaacaataggagctttggctgaatacttgtctgtctctcacaatacggcgtcagagcatactaaacgtttgattcaaaggggatttatagctaaacggcgaagtcaacaggatgaacgaaaagttttagttttcttaacacaagaaggaagatctgttcttgaacagcatacacagctagataaagagaaattaaaagaaataattgaacgaatgagcacattagaaaaagaattacttgaacaggcatttgaacttttaagtagggaagctaaacaatggcagttttaagtaaagtgatcatctctgcgttgattatcggttttgttactgaaatatcaaaaagacatccgacctatggcggcatcattgctgctttgcccttggtcagtttattaagccttttttggatgcaaatacaaggtgaaaaaatagctcaattaagtcaatttgcatctggtgtgcttacaggaatcccagctacagtttgtttactagctattttggcttttttgctgaaaattcatgtgccgttttggtttgcattatgtgttggaatactaggatgggctatgtttttatggatgcagaagatctttctcaatatattatttaactgagtatagaaaggagatgctatgtttttaaaaaaggttactcttcttcgagataagattttggactttgacagatttccttttactatcccggctataagtcaattaaatgacatcttatttactagccaagtgactttttttgtgggggaaaatggatctggaaaatctactttgcttgaagcgatagcagataagtgtgaattcaatacagcgggcggaagccgaaataatgtctatgaattacgggagtcagattcccatttaggagattacatacgtttatcttggcttccaaaggtaacaaatggcttcttcttaagggctgaatcgttttatcatctttctcttcatctggatgagatggaactagatgctcctcagccataccgttcctatggagggagaccgctacacaatcaatcacatggagagtcctttatgtctctattccgtcatcgttttaaagagaaagcgatttaccttttagatgagccagaagcagcactttctccagctagacaattagcttttttgagagttatacatgatttggtgaagggcggaaatgtacagattatcattgcgactcactccccaatcctactgggctatcccaatgctaatattttaagctttgatggtggaagaatacatcatattgaatatgagaatacagagcatgttcaattaacacgatattttcttggacaaagagaaaaaatattagctgagctgttccgcgactaacatcgagttgatctgaaacgcgtttcatagcctatgataggtttatcaaataattcaggagtgataaacactatgatccaccagcatccagaatcttttccgaaacattttttgtggggctctgcttctgcagcgtaccagattgaaggcgcttggaatgaagatggcaaaggcccttctgtttgggatgtgtttacgaaaataccgggcaaaacgtttaaaggaaccaatggcgagattgcggttgaccattatcaccgatttaaagaagatgtcgctctgatggctgagatggggttaaaagcatatcgattttccgtcagctggccacgggtttttccaaaaggaaaaggagagatcaatgaagcaggtctagcgttttacgatagtctgattgatgaattgctttctcatcacatcgagccggttctgactttatatcactgggatttgcctcaagcgcttatggacgaatacggcgggtttgaatccagaaacatcatagaggattttaatcactactgtattactctttataaacgttttgaagacagggtgaaatattgggttacgttaaacgaacagaactacaattttaatcacggatttattacagccatgcatccgcctggagtgaaagacagaaaacgattttacgaagcaaaccatattgcgtttctggctaatgcaaaagccatcgaatcatttagagaatatgtgcctgaaggcaaaataggtcctagctttgcttattctccggcttaccctttatcaagccatccagaggatatactggcatttgaaaacgccgaagaatttatgaacaattggtggcttgacatgtattgctggggaacctacccgcaaattccattccgctacttggaaaaacagggatgggcgccgacaatcgaagcaggagatatggagctgcttgccaaagggaagcctgattttgtaggtgtcaattattatcagacgatcacctatgaacgaaatccgcttgatggtgtgtctgaagggaaaatgaatacgacaggccaaaaaggaaccaatcaggagacggggatacccggggtgttcaaaacgaaaaaaaatccgcatctgacaacgagcaactgggattggacaattgacccaattgggctgcgtatcggtcttcgccgaattacaagccgctatcagcttccagtgtttataacagagaacggtttgggtgaatttgataaagttgaggacggcactgtacaggatgattatcgaattgattatttgcgttcgcatcttgagcaatgcagacaagccatcagtgacggtgtcgatttaatcggctattgcagctggtcgtttactgatctgttaagctggctgaacggctaccaaaaaagatacggatttgtatatgtcaatcgtgatgaagaaagcacatacgatttaaaacgcttgaagaaaaaaagcttttattggtatcaagatgtcatcaagacgaacggagaaagtttataaagagtccctgagagttattctctcaggggtttttcattacacagaaacagcatcaataatataagtgtcggcgtgcaaatctgacatttcagccggcacagtccagcatgtcaattgatagtctcctttaggcagatcaaaggacagtcttttagacatgatgctttcaatatgaattccgttttctgtgacatgaaaaggaacagtcacttttttttcgtaggagcttactgtttctgaactgttcaggcgcaaaagaataaaggcctttgtatttcgctgtgcctcaaaggaaatggctccgtctgccgcagcatatcctttttcaatcgcttcgtcagtccaatccattacaggaggtgtagaatccttttgaaatacagtaaattgatgatatgaaatcgaaagttcttgcggcttccatgatttgatcaatgtgctgttcctcctctatgtactgtttactgaattgtgaataaaacctttgtgccgtctgggtaatcggtaagctgatgcccgacccaagagcctgctccgcggttgtcagcgggagaaatgtattctacagaagctccctcaccgccttctttgcacatggccattggccattcatctctgtcatacccctttttggaaggtacgtcctttaatgattgctcgcggcgttcctcagctccgtctctgtcaatagtgcacacctctgagtgcccctcatttatcgcatccttaatatgcttggcagtttcgggataacggtcagaaggaaaggtgattgtttcatcatattctttcgtttgagacgttttttgatcagctgagaaaaagtctccttttatcaggccgacagctgcagctgctatgatgacgatgacgagaagtatcgtttttatgatgtccgtcgtgatgttcacctcccgcttttaaaactgacacaagagtaatccagaaagcatttggtgtaaaggtttaaattttatgttttacgatcagtttattgcagaaatcgtaattttagcagatcgaaatatttgttttcagcaaaatacgattgccaatttacaataatgatagtaagtcatcagccgttttcggcttgattaatcattttaaattggcttatgataccggtaagctcctcagctaattgagaaagtgtttcagaagctgcggtaatctcctccattgcagcaaattgctcctctgttaatgcagccgcttgccgggtatttttagtagattctttaatgtcggccgtattggctgcaaaggaatcatttatttgatgtgcactggctgaaatgtttgttacagatgctgataaatcactaatctcggcgctgatttcacctgttgcagctgcaatttccttaaatgcatctctggtgcgctggatcatggtgactccttctgcagcttctgttttcacatgctcaacagatcttgcagaccggttcatatccttttgtatttctatgatcagttttgaaatctgccccgcagactgttgagactcttctgctaatttccgtacttcatcagcaacaacagcaaagccttttccttgttcaccggctctggcagcttcaatcgctgcattcagcgcaagcaggtttgtctgatcagcaatttgggtgatgaccgataaaatttgctcaatttgtttagagcggccgtctaactggtgtatgatttctccgcttttctgaattgactggtgaatcgcatccatttgcgcctgtacatttgcaatttccttttgtccaatgtctgcttttgattgagcgagctgccctttgtcagcgatagcggcagtatttgcagaaatatcccggatgtctgctgaagcttgttttaatgagctttcactattttcaattcgggtgatctgatcttgggctccatttgcaatctgctgtacagcttctgtgattttttctgaagcttgatttgtttcctctgctccggctgagagctgctgagaggctgacgcaagctgaagggctgattgttgtacggtttgtatggtatcgttcagcttcattctcatcttattataatagacgcttagttctgaaagctcgtcaccggttttgtctgacacctctattgtcatatctccgtttccggcactttcaaaggcgctttttaaagcgttcagccgcttgttgatttttctggtgaaaaccaaaacaaggatgactgatactataatgacgataacaagaacgatagcgaattgagtgaaaagtgattgtgtaagtgatgctaaaatactttgattagctccggtatacagcatgccgatgatgttgccattttgatcttttaacggcatgtatgcagtctgataagaagaacctgctacatctgcttgtccgtaaaaacgctttcctttctttaaaacagcggcaataacttcagaagaagcctgggtgccgacagctctttcgccattcttcatgacattggttgcaacacgagtatcgccttggaaaatggtaatggtatcacctgtcttttcaccaagcagatcaacaatatcttcatttccattgatttgtgtttgccctttatagagcttattgtttttcacctgccagtcgcctgacatgacatcatcaatataagtgctgcttaaagcgagatcacctttcgctttttcagttgccatttgtttcatgttttctgtaatttccttaagcatcacagtgccaactgatgccgaaaacaaaagaatcaccacgaaaacgaggcaaagaattttagttcctagcttcatcttaaatcgttttatcaacataattcctccctttacgatttgcaggtcatattacttatcgggtttttgggtttaaagttttattttagaaaaaataaaaccgacctgatcttcaggccggttgtgtgatgctattcaaggtttgcgtggtgagtgaacatagtttcagaatcgagtccttttttctccatgagttttaaaatcactgcatcatagaatagcagcaaagtttgttcaaataatgatcccattggctgaatggttttatagcttccgtttgactggtctttaggagaaccaggcattctgatgatgaggtccgcttgttttccgatgcttgattccggattgatggttaaagcggcaacaattccgtgtaagctttttgcttttgctgcggtatgaatcaagctttttgtctcgcctgatcctgagccgataataactagatctcctttggcgagcggcggagtgagaatctcacctacaatatgggcgttgaagcccatgtgcatcagtctcatcgcgaaggattttgccatcaggccagaccgccccgcacccgcggtgaaaatttggtgggatgaaagaatgtgatcggcaagctggtcagcttcttcattagaaatataagctactgaattgtgtaactcattgagaatttccgctacgtattcagtcgttttcataggagttatccttggacaatcagctgcttcatttttgaagctgtttccgccttatcagctgcgcttgtaattccgcccccaacaatgacaaggtcagggttttgcttgatcacttctggcagtgtatcaagtttgatgccgcccgcgattgcggtttttgcgttttttacggtatttttgattgtcgttaattcttcgaaagagtttttgccctctgcttgaagatcatagccagtgtggacgcagatgtagtcaacgcctagtgcgtcaatttctttcgcacgggattcgatatctttcacgttaatcatgtccactaagattttcttcttttgttttttggcttcttctactgcgcctttaatcgttgcatcgtctgtagcccctaaaacggtgatgatgtcagcgcctgcttccgacgctttcataatttcgtagcctccggcatccatgattttcaggtctgcaagaaccttcaattgaggaaatgcttcttttatttctttaacggctcttaggccttcattgatgacgaccggtgttccgatttcaactacgtcgatgtattgttctacctctttgacgagctcaatggcttccgggatgttgacgaggtctaatgcaagctgtaattccattgttgattcactccctttttcgaattatttttcattctataggttctcttatttgatgagaagtaggcactttgaagtcaacaagttacttggaggatactgtgaggagagacaatcagatttctttcgcttgattttatgagtgagtataatgaaaaaagagtctgcaaaaaagtaagtaagtgatgatacgtatctaacatacaaaaagattactaaggggggattctattgagccggatggacgacaaaaggtttaattgtgagaaggaattaacgcttgcagtgattggcggtaaatggaagatgctcattttatggcatttaggaaaagaaggcacaaaacggttcaatgaattaaaaacattgattcctgatattacgcagaagatcctcgtgaatcagctgagagaacttgagcaggatatgattgttcacagggaagtgtatccggttgtcccgccgaaggttgagtattctctgaccccgcatggagaaagcctcatgcctattcttgaagccatgtatgagtgggggaaaggctatatggaattgattgatatcgacaaaaatgtcatgaaagaatcgttgtaagacgctcttcgcaagggtgtcttttttttgcctttttttcggtttttgcgcggtacacatagtcatgtaaagattgtaaattgcattcagcaataaaaaaaaattgaacgcagcagtttggtttaaaaatttttatttttctgtaaataatgtttagtggaaatgattgcggcatcccgcaaaaatatccctgtaaataaactggaatctttcggcatcccgcatgaaacttttcacccatttttcggtgataaaaacatttttttcatttaaagtgaacggtagtaagataaaaaatattgaaaacaatgaataaatagccaaaattgtttcctgttaggataggggttcttgcggtctttatccgcttatgttaaacgccgcaatactgactgacggctgcccgttttaatagcggcaatctgttttttgtttggaagcactgctttttaagtgtagtactttgggctatttcggttgttagttcataagaattaaaagctggtatggataaaaaagagaaaatgctctgcacaagttcactgtttatgaagactaggggaggtatgaaaatatggaaataactttttatcctttaacggatgcacaaaaacgaatttggtatacagaaaaattctatcctcacacgagcatttcaaaccttgcggggattggtaagctggtttcagctgatgcgattgattatgtgcttgttgagcaggcgattcaagagtttattcgcagaaatgacgccatgcgccttcggttgcggctagatgaaaacggggagcctgtacaatatattagcgagtatcggcctgttgatataaaacatactgacactactgaagatccgaatgcgatagagtttatttcacaatggagccgggaggaaacgaaaaaacctttgccgttgtacgattgtgatttgttccgtttttccttgttcaccataaaggaaaatgaagtatggttttacgcaaatgttcatcacgtgatttctgatggtatctccatgaatattctcgggaatgcgatcatgcacatttatttagaattagccagcggctcagaggcaaaagaaggaatctcgcattcatttatcgatcatgttttatctgaacaggactatgctcaatcgaagcgatttgaaaaggacaaggcgttttggaacaagcaatttgaatcggtgcctgaacttgtttccctgaaacggaatgcttccgcaggaggaagtttagatgctgagaggttctctaaagatgtgcctgaagcgcttcatcagcagattctgtcgttttgtgaggcgaataaagtcagtgttctttcggtatttcaatcgttgctcgccgcctacttgtacagggtcagcggccagaatgatgttgtgacgggaacctttatgggcaaccggacaaatgcgaaagagaagcagatgcttggcatgtttgtttctacggttccgcttcggacaaacattgacggcgggcaggcgtttttagaatttgtcaaagaccggatgaaggatctcatgaagacactccgccaccaaaagtacccgtataatctcctgatcaacgatttgcgtgaaacaaagagctctctgaccaagctgtttactgtttctcttgaatatcaagtgatgcagtggcagaaagaagaggatcttgcctttttgactgagccgattttcagcggcagcggattaaatgatgtctcaattcatgtaaaggatcgatgggatactgggaaactcaccatagattttgattaccgcactgatttattttctcgtgaagaaatcaacatgatttgtgagcgcatgattaccatgctggagaacgcgttaacgcatccagagcataccattgatgaattaacgatgatttctgatgcggagaaagagaagctgcttgcgagggccggcggtaaatctgtgagctaccgtaaggacatgacgatcccggaactgttccaagaaaaggctgagcagctttcagatcatccagcggttgtattcgaagatcgtacattgtcctatcgaacgttacatgaacaatccgcacgcatcgccaatgtgctgaaacagaaaggggttggcccggacagtcctgtcgcggttttgattgaacgttctgaacggatgattacagctatcatgggaattttaaaagccggcggagcctatgtgccgattgatccgggttttcctgcagagcggattcaatatattttggaggactgcggggcggacttcatcctgactgaatcgaaggttgcagcgcctgaagccgatgctgagctgattgacttagatcaggcaattgcggaaggtgcagacgatatgacggaggctgatgtaaacgcgcggaatcttgcctacattatttacacatcgggaacaaccggacgtccgaaaggcgttatgatcgagcatcgccaggttcatcatttggttgaatctctgcagcagacgatttaccaaagcggcagccaaaccctgcggatggcattgcttgcgccgttccactttgatgcgtcagtgaagcagatcttcgcgtcgcttcttttgggacaaaccctttatatcgtaccgaagaaaacagtgacgaacgggaccgcccttgctacatattatcggagaaacagcattgaggcgacggatggaacaccggctcatttgcaaatgctggcagcagcgggcgattttgaaggcctaaaactgaagcacatgctgatcggaggagaaggcctgtcatctgttgttgcggacaagctgctgaagctgtttaaagaagccggcacagcgccgcgtttgactaatgtgtacgggccgactgaaacgtgcgttgacgcgtctgttcatccggttatccctgagaatgcagttaaatcagcgtatgtgccgatcgggaaagcgctggggaataaccgcttatatattttggatcaaaaaggccggctgcagcctgaaggcgtggcgggtgagctttatatcgcgggagacggtgtgggccgaggctatttgcatttgcctgaattaacggaagagaagtttttacaagatccattcgtgccgggcgatcgcatgtaccggaccggggacgtggtgcgctggcttccagatggaacaatcgaatatttaggcagagaggatgaccaggtcaaagtccgcggataccggattgagcttggggaaattgaagccgtgattcagcaggcgccagacgttgcaaaagccgttgttttggcacgccctgacgaacagggaaatcttgaggtttgcgcatatgttgtgcagaagcctggaagcgaatttgcgccagccggcttgagggagcatgcggccagacagcttcctgactatatggtgccggcttactttacagaagtgacagaaattccgcttacgccaagcggcaaagtcgaccgccgcaagctgtttgcactagaggtgaaggctgtcagcggcactgcctatacagcgccgcgaaatgagactgaaaaagcaatcgcagccatttggcaggacgtgctgaacgttgagaaggcggggatttttgacaatttctttgaaacgggcgggcattcattgaaggccatgacccttttaacaaagattcataaggaaacaggcatcgagattccgcttcaatttttgtttgagcatccgacgattgcggctcttgcagaggaagctgatcacagagaaagccgggcattttcggtgattgaacctgctgaaaaacaggagcattatccgctttctctggcacagcagcgaacatatatcgtcagccagttcgaggatgcgggagtcggctacaacatgcctgcggcagcaattctggaagggcctttagatattcaaaaactggagcgcgcatttcaggggttaatccgacgccacgagtcattgagaacatcatttgttcttgaaaacagcacgccgagacagaacattcacgatagcgttgatttcaacatcgaaatgattgaaagaggcggccgctcagatgaggcaattatggcttcattcgttcggacatttgatttggcgaaagctccgctgttcagaatcggtttgctggggcttgaagagaaccgtcatatactgctgtttgatatgcaccatttgatttctgacggtgtatccattggcattatgctggaggagttagcacgcatttataaaggcgaacagcttcctgagcttcgtctccagtataaggactacgctgtatggcaaagcagacaggctgctgaagggtacaagaaggaccaggcttattggaaggaagtctttgcaggcgagctcccggtgcttcagcttctgtccgattacccaagaccgcctgttcaaagctttgaaggggatcgggtgtcaatcaagctggatgcgggggtaaaggatcgcctcaatcgtttggctgaacaaaacggcgccactttatatatggtgatgctgtccgcttactatacgcttttgtcaaagtatacggggcaggatgacatcattgtcgggacaccgtcagcgggcagaaatcactccgatacagagggcattatcgggatgtttgtcaatacgcttgcgattcgcagtgaggtgaagcaagatgagacgtttacccaattgatctcgcgtgtccgcaaacgggtgctgaatgccttttctcatcaggactatccgtttgagtggcttgttgaagatttgaacatcccgcgtgatgttagcaggcatccgctgtttgacacgatgttcagccttcaaaacgcgacagcaggcattccggctgtcggcgatctgtccttgtctgttcatgagaccaatttcaagattgccaaatttgatttgaccgtgcaggcgagagaaaccgatgaaggcattgagcttgatttggattacagcacaaagctgtttaaacaaagcacggcaaacaggctgcttacgcattttgcgcgtttgcttgaagatgctgcggctgatccagagaagccgatttctgagtataagcttctttctgaagaggaggccgcttcgcaaattcagcagtttaacccgggcagaacaccttatccgaaagataaaacaattgttcagctgtttgaggagcaagcggcgaatacgccagaccatactgcgcttcaatatgaaggcgaatcactcacttatcgtgaactgaatgaacgggccaatcgtttagcccgcggcattctttctcttggagctggcgaaggcagaactgcggctgtcttatgcgagcggtcaatggatatgattgtgtcgatcttggcagtattaaaatcaggttcggcttatgttccgattgatccggaacatccgagtcagcggatgcagcatttcttccgtgacagcggagcaaaggtgcttctcactcagagaaaattaaaggctttagcggaagaagcggaatttaagggcgttatcgtgctagccgatgaggaagagagctatcatgccgatgcgcgcaatctcgcactgcctcttgattctgaagcaatggccaacctgacgtatacctctggaacgactggaacacctaaggggaatatcgtgacacatgccaatattctccgcacggtgaaggaaacgaattatctcagcattacagaacaggatacgattctcggtctttccaattacgtgtttgacgcgtttatgttcgatatgttcggatctttgttaaacggagccaagctggtgctgataccgaaggaaaccgttttggacatggctcgtctgtcccgcgtcattgaacgggagaatatcagcattctcatgattacaaccgctttgttccacttgcttgtggacttgaatccggcgtgcttgtcaacgcttcgcaagattatgtttggcggggaacgggcttcggttgagcatgtcagaaaagctttgcaaacggttggaaagggcaagctccttcacatgtatggaccgtctgaaagcacggttttcgcgacgtatcatccggttgatgaattggaggagcacacgctgtctgttccgattggaaaaccggtcagcaatacggaagtatacattcttgacagtacgggacacgtgcagcctgccgggattgccggagagctttgcgtcagtggcgaaggactcgtgaaaggctattacaaccgtccagaactgactgaggagaaatttgttccccatccgtttacatccggcgaacgcatgtataaaacgggagaccttgctagatggctgccgaatggcgacatcgaatttatcgggcgaatcgaccatcaggtgaagattcgcggacagcgcatcgaacttggagaaatcgaacatcagctgcaaacccatgatcgtgttcaggaaagtgttgtgcttgccgttgatcaaggagcgggagataaactgttgtgtgcttattatgtcggagagggagacatctcatcacaagagatgagagagcatgctgcgaaggacttgccggcatatatggttcctgcggtgtttatccaaatggacgagctgccgctgacagggaacggaaaaattgaccggagagcgctgccgattcctgatgccaacgtttcaagaggtgtttcatatgttgcgccacgcaatggaacggaacaaaaagtcgcagacatttgggcacatgtgcttcaggcagaacaagtcggcgtttatgaccacttctttgacattggcggacattcattagcaggcatgaagatgcttgccttggttcatcaggaactgggcgttgagctgtcactcaaggatctcttccagtcaccgacggttgagggcttggcacaggtgattgcctctgctgaaaaagggacagccgcaagtatcagcccggcagagaaacaagatacgtatcctgtttcttcaccgcaaaaacggatgtacgtgcttcagcagcttgaggatgcgcaaacgagctataacatgccggcggttctgcgcctgacaggtgagcttgatgttgaaaggcttaacagcgtcatgcagcagttaatgcagcgtcatgaagccttgagaaccacgtttgaaataaaagatggagaaacggtgcagcggatctgggaagaggctgagtgtgagatagcctatttcgaagccccggaagaagagacagagcggatcgtttctgagtttattaagcctttcaaaatcgaccaacttccactgttcagaatagggcttatcaagcattcagacactgagcatgtgctgctgttcgatatgcatcatattatttctgatggtgcatctgtcggtgtgctgattgaggagctttcaaagctgtacgacggagaaacccttgagccgctccgtattcaatataaggattatgctgtgtggcagcagcagttcattcagtctgagctttacaagaagcaagaagagcattggctgaaggagctggacggagagctgccggtgctgacgcttccgaccgattacagtcggcctgccgttcaaacatttgagggagaccgcattgcattttcattagaagcaggcaaagctgatgctctgcgcaggcttgcaaaagaaacggattccacgctttacatggtgcttctggcttcatacagtgcatttttatcaaaacttagcgggcaagacgatatcatcgtcggttcacctgtggccggacgatctcaagcggacgtcagccgcgtcatcggaatgttcgtcaatacattggcgctgcgcacgtatccgaagggtgaaaagacgtttgctgactatcttaacgaagtgaaagaaacggcactcagcgcttttgatgcgcaggattacccacttgaggatttgatcggaaatgttcaggttcagcgtgacacaagcagaaatccgttattcgatgcagttttttcaatgcaaaatgcgaatataaaggatttaacaatgaaagggattcagcttgagccgcatccgtttgaacggaaaacagccaagtttgacctcacgctgacggctgacgaaaccgacggagagcttacattcgtactcgaatacaatacagctctgtttaagcaggaaacgattgaacgatggaagcaatattggatggagcttttagatgatgttactgggaacccgaaccagctgctttccagcctgtcactggtcaccgagacagaaaagcaagcgcttcttgaggcatggaagggcaaagcgctgcctgtgccgacagacaaaacggttcatcagctattcgaagagactgtccagcgccacaaagaccgcccggctgtcacatacaacggccagtcttggacgtacggcgagctgaatgcgaaggcgaaccgtctcgcgcggattctgatggactgcggcattagcccggatgaccgcgtcggcattctcacgaagccgtcgcttgaaatgtccgccgcggtgctcggcgtcttgaaagccggagcggcgtttgtgccgattgatcctgactacccggatcagcggattgagtatattttacaggacagcggcgcgaagcttctcttgaaacaggaagggatttcagtgccggacagctttacgggagatgtcattcttctcgatggaagccgcacgattctaagcctgccgcttgatgaaaacgacgagggaaatccagaaaccgctgtaaccgcggagaacttggcgtacatgatttacacgtctggaacgaccggacagccgaagggtgtcatggtcgagcaccatgcgcttgtgaacctgtgcttctggcaccacgacgcgttcagcatgacagcggaggaccgcagtgcgaagtacgcgggctttgggttcgacgcttccatttgggagatgttcccgacctggacgatcggtgccgagcttcacgtcattgatgaagcgatccgcctcgatatcgtccgcctgaacgattattttgaaacgaacggcgtaacgatcacgttcctgccgacacagcttgcggaacagttcatggagcttgagaacacatcacttcgcgtattgctcattggaggagacaagctgaagcgcgcagtgaaaaagccgtacacactcgtcaacaactacgggccgacagagaatacggtcgttgccacaagcgcagaaatccatccggaggaaggctcgctttccatcggaagggccattgccaatacgagagtatacattctcggcgagggcaatcaggtgcagccggaaggcgtagccggagagctttgcgtggcggggcgcggactggcacgcggctatctgaatcgagaagacgaaaccgcgaagcggtttgtcgctgatccgtttgtgcctggtgagcgcatgtaccgcaccggcgatttggtgaaatggacgggcggcggcatcgaatacatcggccggatcgaccagcaggtcaaggtccgcggctaccggatcgagctctcagaaattgaagtccagctcgcacagctttctgaggtgcaggatgcggcggtgacagctgtcaaagataaaggaggcaacacagcgatcgcggcgtatgtcacaccggaaacagctgacatagaagcactgaaatcagcactaaaggaaaccctgccggattacatgatcccggcgttctgggtgacgctggacgagcttccggttacggcaaacggcaaagtggaccgtaaagccttgcctgagccggacatcgaagcgggaagcggagaatacaaagcgcctacgaccgacatggaagagctgcttgccggcatctggcaggacgtgcttggaatgtctgaagtcggtgtcaccgacaatttcttctcgcttggcggagattccatcaaaggaattcaaatggcgagccgcttgaaccagcacggctggaagctggaaatgaaagatctcttccagcacccgacgatcgaagagctcacccagtacgtagagcgtgccgaaggcaaacaggcagaccaaggcccggtagagggcgaagtcatcctgacgccgatccagcgctggttctttgaaaagaacttcacgaacaagcaccactggaaccaatcggtgatgcttcacgccgcgaagggctttgaccctgaacgggtggagaaaacattgcaggcgctgatcgagcatcatgacgcgctccgtatggtctatcgtgagggactggaagacgtcattcaatacaacagaggtcttgaagctgcttccgctcaattggaggtcatccagattgagggccaagctgcagattacgaagaccgtatagagagagaagcggagcgtttgcaaagcagcatcgacttgcaggaaggcggcttgttaaaagcaggattgttccaagcggaagacggagaccacttgcttcttgccattcaccacttagtggttgacggcgtgtcgtggcggattttactggaggatttcgccgcggtatatacacagcttgagcaaggcaatgaaccggttctcccgcagaaaacacattcatttgcagagtatgcagagagattgcaagacttcgcgaactccaaagcctttttgaaagaaaaagagtattggagacagctcgaagaacaagctgtcgcggcaaagcttccgaaagaccgcgaatctggtgatcagcgaatgaaacatacaaagacaattgaattctcgctgactgctgaagagacagaacagctcaccacaaaggtgcatgaggcatatcacacagaaatgaatgatattttgctgacggcattcggattggcaatgaaggagtggacgggtcaagatcgagtaagtgttcatttagaggggcatggacgtgaagaaatcatagaagacctgaccatttctcgcacagtcggctggtttacaagtatgtacccaatggtgctcgatatgaagcatgcggatgatctgggctaccagctgaagcaaatgaaagaagatatcagacatgtgccgaataagggagtcggatacggcattctgcgctatctgacggcacccgaacataaagaagatgtggcgttctcgattcagccggatgtcagcttcaactatttaggtcagtttgacgaaatgtcggatgcaggtttgtttacgagatcagagctgccatcaggacagtcattaagccctgaaacagaaaaaccgaatgcgctggatgttgtcggatatatcgaaaacggaaaactgacgatgtcactggcctatcattctcttgaatttcatgaaaaaacagtacaaacattcagtgacagctttaaagcgcatcttctcagaatcattgaacattgcctatctcaagacggtacggaactgaccccgagtgatcttggtgacgacgatttgacgctggatgagctggataaattaatggaaattttctaatagaggtggcatatgagcaaaaaatcgattcaaaaggtgtacgcactgacaccgatgcaggagggaatgctgtatcatgcgatgcttgatccgcattcttcctcgtacttcacacaattagagcttgggattcacggcgcttttgatcttgaaatctttgagaaaagcgtcaatgaactgattcggtcatacgatattctccgtacggtatttgtgcatcagcagctgcaaaaaccgcgtcaggtcgtgttagcggaacgcaaaacaaaggtgcattatgaggatatcagtcatgcagacgagaaccgccagaaagagcacattgagcgttacaaacaagacgttcagcgccaaggctttaacctggcaaaagacatattgttcaaggtagcggttttccgccttgatgcagatcagctgtatcttgtctggagcaatcatcatattatgatggacggctggagcatgggcgtcctcatgaaaagcctgttccaaaactatgaagcgctcagagcaggaaggacacctgcaaacggtcaaggcaagccttactccgactacatcaaatggcttggaaaacaggacaatgaagaagcggagagctactggagcgagcgcttggcgggttttgaacagcccagcgtgctcccgggccgcctgcctgtaaaaaaagacgaatacgtcaataaagaatattcctttacatgggacgaaacactggttgcccgcattcagaaaaccgcaaaccttcatcaagtgacagggcctaacctatttcaggccgtttgggggattgttctcagcaaatacaactttacggatgatgttgtcttcggaacggtcgtctcaggaaggccgtctgaaatcaatggaattgaaacgatggcggggctgtttatcaacaccattccagtgcgggtgaaagttgaacgagatgctgcattcgctgatattttcacagctgttcagcagcatgcagtagaggcagagcgttacgattacgtgccgctctatgagattcaaaaacgctcagctcttgatggcaatctcttaaaccatcttgtcgcgtttgaaaattatccgcttgatcaagagcttgaaaacggcagcatggaagaccgcctcgggttttcgattaaggtagaaagcgcatttgaacaaacgagcttcgatttcaacctgattgtgtatccgggcaaaacgtggaccgtcaaaattaaatataacggagccgcctttgattccgcttttatcgaacggacagcggagcaccttacccgcatgatggaagcagctgtcgatcagccggccgcttttgtgcgtgagtacgggcttgtgggagacgaagagcagcggcaaattgtcgaggtgtttaacagcacgaaagccgaactccctgcaggaatggctgttcaccaagtgtttgaagagcaagcgaaacggacgccggcgagcactgccgtcgtatatgaaggaaccgtgctgacgtaccgcgagctgaatgcagcggctaaccgtctggcgagaaagcttgtcgaacaaggccttcaaaaaggggaaacagcagcgattatgaacgatcgatcagtagaaaccgttgtcggcatgctggctgtgttaaaagcaggcgccgcatatgtgccgcttgatccagcgcttccgggggatcgtcttcgtttcatggcagaggacagctccgttcgaatggttttgaccggaaattcttatacagggcaggcacatcagctgcaggtgccggttcttacactggacataggcattgaagatggcgaagctgacaatctcaacctgccatccgccccgtctgatttggcgtacatcatgtacacatccggttcaacgggcaaaccgaaaggcgtcatgatcgaacataaaagcattctgcgcctcgtcaaaaatgccgggtacgttcctgttactgaagaggaccgcatggcgcaaacaggggcagtcagctttgatgccggaacgtttgaggtattcggcgcactgctgaatggcgcagcgctttatccggtcaaaaaagagacactgcttgatgcgaaacaatttgctgcattcctgcgtgagcaaagcatcacaactatgtggctgacatcacctttattcaaccagcttgctgcaaaggatgcgggtatgttcggcacactgcgccatttaatcatcggcggagatgcccttgtcccgcatattgtcagcaaagtaaaacaggcatcgccgtcgctttcattgtggaacggatacggcccgacagaaaacacgacgttttcaaccagttttctgatcgaccgcgagtatggcggctctatcccaatcgggaagccgatcggaaattccactgcctatattatggatgagcagcaatgcctgcagccaatcggcgcgcctggtgagctttgcgtaggcggaatcggtgtagcgcgtgggtatgtcaatctccctgagctgacggagaagcaatttctggaagacccgttcagaccgggtgagagaatttaccgcactggtgacttggcaagatggctgccggacggcaatatcgaatttttaggcagaatcgacaaccaagtgaaggtgcgcggcttccgaattgagcttggcgaaattgaaacaaaactgaacatggctgagcatgtgacagaagccgcggtgatcatccgcaagaacaaagcagacgaaaatgaaatttgcgcgtacttcacggcggatcgtgaagtggctgtgagtgagctgagaaaaacactgtctcagtctttgcctgactatatggtccctgcccacctgattcaaatggacagcctgccgctcacgccaaacgggaaaatcaacaaaaaggaactgcctgcaccgcaatcagaagccgtgcagccggaatacgcagcaccaaaaacagagagtgaaaagaaattagcggagatctgggaaggaatactcggcgtcaaagcaggcgttaccgataacttctttatgatcggcggccattctttgaaagcgatgatgatgacggcgaaaattcaagagcattttcataaggaagttccgataaaagtgctttttgaaaagccgactattcaagaactggcactgtatttggaagagaacgaaagcaaggaggagcagacgtttgaaccgatcaggcaagcatcttatcagcagcattatcctgtatccccggcccagcggagaatgtatatcctcaatcagcttggacaagcaaacacaagctacaacgtccccgctgtacttctgctggagggagaagtagataaagaccggcttgaaaacgcgattcagcaattaatcaaccggcacgaaatcctccgtacatcgtttgacatgatcgacggagaggttgtgcaaaccgttcataaaaacatatcgttccagctggaggctgccaagggacgggaagaagacgcggaagagataatcaaagcatttgttcagccgtttgaattaaactgcgcgccgctcgtccgttcgaagcttgtccagctggaagaaaaacgccacctactgctcattgatatgcatcatattattactgacggcagttcaacaggcattctaatcggtgatcttgccaaaatatatcaaggcgctgatctggaactgctacaaattcactataaagattacgcagtttggcacaaagaacaaactaattatcaaaaagatgaggaatactggctcgatgtctttaaaggcgaactgccaatactggatcttcccgcggatttcgagcggccagctgaacggagctttgcgggagagcgcgtgatgtttgggcttgataagcaaatcacggctcaaatcaaatcgctcatggcagaaacagatacgacgatgtacatgtttttgctggcggcgttcaatgtactcctttccaagtacgcgtcacaggatgatatcattgttggctcgccgacagctggcagaacacatcctgatctgcaaggtgtgccgggtatgtttgtcaacacggtggcactcagaacggcaccagcgggagataaaaccttcgcgcaattccttgaagaggtcaaaacagccagccttcaagcattcgagcaccagagctatccgcttgaggagctgattgaaaagcttccgcttacaagggatacaagcagaagtccgctgttcagcgtgatgttcaacatgcagaatatggagattccttcattaagattaggagatttgaagatttcctcgtattccatgcttcatcatgttgcgaaatttgatctttccttggaagcggtcgagcgtgaagaggatatcggcctaagctttgactatgcgactgccttgtttaaggacgagacgatccgccgctggagccgccactttgtcaatatcatcaaagcggccgcggctaatccgaacgttcggctgtctgatgtagatctgctttcatctgcagaaacggctgctttgctagaagaaagacatatgactcaaattaccgaagcaacctttgcagctctttttgaaaaacaggcccagcaaacacctgaccaccctgcggtgaaggctggcggaaatctgctgacctatcgcgagcttgatgaacaggcgaaccagctagcgcatcatcttcgtgcccaaggggccggaaatgaagacattgtcgcgattgttatggaccggtcagctgaagtcatggtatccattctcggtgtcatgaaggcgggggcagctttccttccgattgatcctgatacacccgaagaacgaatccgttattcattagaggacagcggagcaaaatttgcggtcgtgaatgaaagaaacatgacggctattgggcaatatgaagggacaatcgtcagccttgatgacggtaaatggagaaatgaaagcaaggagcgcccatcatccatttccgggtctcgcaatcttgcatacgtcatttatacgtccggtacgaccggaaagccaaagggcgtgcagattgagcatcgcaatctgacaaactatgtctcttggtttagtgaagaggcgagcctgacggaaaatgataagactgtattgctttcatcttacgcatttgaccttggctatacgagcatgttccccgtacttctgggcgggggcgagctccatatcgtccagaaggaaacctatacggcgccggatgaaatagcgcactatatcaaggagcatgggatcacttatatcaaactgacaccgtctctcttccatacaatagtgaacaccgccagttttgcaaaagatgcgaaatttgaatccttgcgcttgatcgtcttgggaggagaaaaaatcatcccgactgatgttctcgccttccgtaagatgtatggacataccgaatttatcaatcactacggcccgacagaagcaacgatcggcgccatcgccgggcgggttgatctgtctgagccggatgcatttgcgaaacgcccgacaatcggacgcccgattgcgaatgccggcgcgcttgtcttaaatgaagcattgaagcttgtgccgccgggagcgagcggacagctctatatcacgggacaggggcttgcgagagggtatctcaacaggcctcagctgacagccgagagatttgtagaaaatccatattcgccgggaagcctcatgtacaaaaccggagatgtcgtacgaagactttctgacggtacgcttgcatttatcggccgggctgatgatcaggtgaaaatccgcggctaccgcattgagccgaaagaaattgaaacggtcatgctcagcctcagcggaattcaagaagcggttgtactagcggtttccgagggcggtcttcaagagctttgcgcgtattatacgtcggatcaagctattgaaaaagcagagctccggaagcagctttccctaacactgccgtctcatatgattcctgctttctttgtgcaggttgacgcgattccgctgacggcaaacggaaaaaccgacagaaacgctttgccaaagccgaacgcggcacaatccggtggcaaagccttggccgcaccggagacagcgcttgaagaaagcttatgccgcatttggcagaaaacgcttggcatagaagccatcggcattgacgacaattttttcgatttaggcggccattcattaaaagggatgatgctgattgccaacattcaggcggaattggagaaaagcgtaccgcttaaagcactgttcgagcagccgactgttcgccagctggcggcttatatggaggcgtctgctgtttcaggcggccatcaagtcctcaaaccggctgacaagcaggatatgtatccattgtcatccgcacagaaacggatgtacgtgctcaatcagcttgaccgccagacgataagctacaacatgccatctgttcttctaatggaaggagagcttgatatttcgtgcctgcgcgattcactcaatcagcttgtgaaccgtcacgaatcattgcggacgtcatttatggaagctaatggtgagcctgttcagcgcatcattgagaaggcggaggttgatcttcatgtgtttgaagccaaagaagacgaagcggaccaaaagattaaggaatttatccggccattcgacttaaacgacgcaccgctcattcgcgcagctttgcttcgaatagaagcgaaaaaacatttgctgcttttagatatgcatcatatcatcgcagacggcgtctcaagaggcatttttgtaaaagaattggcgctgctttacaaaggagagcagcttccggagccggcgcttcattataaagatttcgccgtttggcaacatgaagctgagcaaaaagaacggatgaaggagcatgaggcgtactggatgtcagttctttcaggcgagctgccagagcttgatctcccgctcgattacgcccgtccgcctgtgcaaagctttaaaggagatacgatccgtttccgtacgggaagtgagacggcaaaggcggtagaaaaactgcttgcggaaaccggaacgaccttgcacatggtgctccatgctgttttccacgtctttttaagcaaaatttccggacagcgggatatcgtcatcggctccgttactgccggccggacgaatgctgatgttcaggacatgccgggaatgttcgtcaatacacttgccctgagaatggaagcgaaagaacagcaaacatttgcggagcttttggagcaagcaaagcagacgaacctgtcagcgcttgagcatcaggagtatccgtttgaagatctggttaatcagcttgatctccctcgggatatgagccgaaacccattgtttaatgtgatggtgacgacagaaaaccctgataaagaacagcttacattgcaaaatctgagcatttcaccttatgaggctcatcagggaacttctaagtttgatctgacactgggcggatttactgatgaaaatggcattggcttgcagctcgaatatgcgacagatctgttcgcgaaagaaacagctgaaaaatggagcgaatacgttctgcggctactaaaggctgttgcggataacccgaaccagccgctttccagcctgtcactggtcaccgagacagaaaaacaagcacttcttgaggcatggaagggcaaagcgctgcctgtgccgacagacaaaacggttcatcagctattcgaagagactgtccagcgccacaaagaccgcccggctgtcacatacaacggccagtcttggacgtacggtgagctgaatgcgaaggcgaatcgtctcgcgcggattctgatggactgcggcatcagcccggatgaccgcgtcggcattctcacgaagccgtcgcttgaaatgtccgccgcggtgctcggcgtcttgaaagccggagcggcgtttgtgccgattgatcctgactacccggatcagcggattgagtatattttacaggacagcggcgcgaagcttctcttgaaacaggaaggcatttcagtgccggacagctttacgggagatgtcattcttctcgacggaagccgcacgattctaagcctgccgcttgatgaaaacgacgagggaaatccagaaaccgctgtaaccgcggagaacttggcgtacatgatttacacgtctggaacgaccggacagccgaagggtgtcatggttgagcaccatgcgcttgtgaacctgtgcttctggcaccacgacgcgttcagcatgacagcggaggaccgcagtgcgaagtacgcgggctttgggttcgacgcttccatttgggagatgttcccgacttggacgatcggcgctgagcttcacgtcattgatgaagcgatccgcctcgatatcgtccgcctgaacgattattttgaaacgaacggcgtaacgatcacgttcctgccgacacagcttgcggaacagttcatggagcttgagaacacatcacttcgcgtcctcttgaccggaggagacaagctgaagcgcgcagtgaaaaagccgtacacactcgtcaataactacgggccgacagaaaatacggtcgttgccacaagcgcagaaatccatccggaggaaggctcgctttccatcggaagggccattgccaatacgagagtatacattctcggcgagggcaatcaggtgcagccggaaggcgtagccggagagctttgcgtggcggggcgcggactggcacgaggctatctgaatcgagaagacgaaaccgcgaagcggtttgtcgctgatccgtttgtgccgggtgagcgcatgtaccgcaccggcgatttggtgaaatggacgggcagcggcatcgaatacatcggccggatcgaccagcaggtcaaggtccgcggctaccggatcgagctttcagaaattgaagtccagctcgcccagctttctgaggtgcaggatgcggcggtgacagctgtcaaggataaaggcggcaatacagcaatcgcggcgtatgtcacaccggaaacagctgacatagaagcactaaaatcagcactaaaggaaaccctgccggattacatgatcccggcgttctgggtgacgctgaacgagcttccggttacggcaaacggcaaagtggaccgcaaagccttgcctgagccggacatcgaagcgggaagcggagaatacaaagcgccgacgaccgacatggaagagctgcttgccggcatctggcaggacgtgcttggaatgtctgaagtcggtgtcaccgacaatttcttctcgcttggcggagattccatcaaaggaattcaaatggcgagccgcttgaatcagcacggctggaggctggaaatgaaagatctcttccagcatccgacgatcgaagagcttacccaatatgtagagcgtgccgaaggcaaacaggcagaccaaggcccggtagagggcgaagtcatcctgacgccgatccagcgctggttctttgaaaagaacttcacgaacaagcaccactggaaccaatcggtgatgcttcacgccgcgaagggctttgaccctgaacgggtggagaaaacattgcaggcgctgatcgagcatcatgacgcgctccgcatggtctaccgcgaggaaaacggggacatcgttcaggtgtataaaccgatcggtgagagcaaggtcagcttcgaaatcgtggatctgtacggctccgatgaagagatgctgagaagccagattaagcttctcgcgaacaagctgcaaagcagtctcgatctgcgaaacgggccgcttttaaaggcggagcaatatcgcacagaagctggggatcacctgctcattgctgtacaccatctcgtggtcgacggtgtgtcatggcggattttgcttgaagactttgcttcaggctacatgcaggctgagaaagaagagagccttgtcttcccgcaaaaaacaaactccttcaaggattgggcggaagaactggcggcattcagccaatcagcgcatcttttacagcaggctgaatactggtcgcaaattgccgctgaacaggtttctcctttaccaaaggattgtgaaacagagcagcggatcgtcaaggatacatcatccgtcctatgtgaattaacggaagaagacactaagcatcttttaacagatgttcatcagccatatggaactgaaatcaacgatattcttctcagcgcgctcggtttgacaatgaaagaatggacaaagggggccaaaattggcattaaccttgagggacacggccgggaggacatcatcccgaatgtgaatatctccagaacggtcggctggtttacggcacaataccctgttgtgctcgacatgtctgaagcagatgcctcagctgtgatcaaaacagtcaaagaaaacctgcgccgcattccggacaaaggtgttggctacggcattcttcgttatttcacagaaacagcggaaacaaagggcttcacaccggagatcagcttcaactatttgggccaattcgacagtgaagtcaaaaccgatttctttgaaccgtccgctttcgatatggggcgccaagtaagcggagaatcagaggcgctgtacgcattaagcttcagcggcatgatcagaaacggccggtttgtgctttcctgctcctacaatgagaaggagtttgaaagagctacagtcgaggagcaaatggaacggtttaaagaaaacctcctgatgctaatccgccattgcacggaaaaagaagacaaggaattcacaccaagcgacttcagcgccgaagaccttgaaatggacgagatgggagatatctttgacatgcttgaggagaatttaaaataaaacgcaagggaattacagaaggcgggagcgaaacatatgagtcaatttagcaaggatcaggttcaagatatgtattacctatcgccgatgcaggaagggatgctttttcatgccatcctgaatcccggccaaagcttttaccttgaacaaatcacgatgaaagtaaaaggtagcttgaatatcaaatgtcttgaagaaagcatgaatgtgatcatggaccggtacgatgtatttcgtaccgtgttcattcacgaaaaagtaaaaaggcctgtccaagtcgtattgaaaaaacggcagttccaaatagaagaaatcgatctgacacacttaacgggcagcgagcaaacagccaaaatcaatgagtacaaagaacaggataagatcaggggttttgatttgacgcgggatattccgatgcgggcagccattttcaagaaagctgaagaaagctttgaatgggtgtggagctaccaccacattattttggacggatggtgcttcggcatcgtcgtacaggatctatttaaggtatacaatgctctgcgcgaacaaaagccgtacagcctgcccccgtcaaaccgtataaagactacatcaagtggcttgaaaagcaggataaacaagcatcactgcgttactggcgcgagtatttagaggactttgaaggacaaacgacgtttgcggagcaaagaaagaaacaaaaggacggctatgagccgaaagagctgctcttttcactgccggaggcggaaacaaaggcctttaccgagcttgcaaaatcgcagcataccactttaagtacggcgctgcaggcagtctggagcgtattgatcagccgctatcagcagtctggcgatttggccttcggtacagttgtttcagggcgtcccgcggaaatcaaaggcgttgaacatatggtcgggctgtttatcaacgttgtcccgagacgtgtgaagctgtctgagggtatcacatttaacggcttgctcaagcagctgcaggagcaatcgctgcagtctgagccgcaccaatatgtgccgctttatgacatccaaagccaggccgatcagccgaaactgattgaccacatcattgtttttgagaactatccgcttcaggatgcgaaaaatgaagaaagcagtgaaaacggctttgatatggtggatgttcatgtttttgagaagtcgaattatgatctcaacctgatggcttcccctggagatgagatgctgattaagcttgcctataatgagaatgtgtttgatgaggcgtttatcctgcgcttgaaatctcagcttctcacagcaattcagcagctcatccagaatcctgatcagcctgtcagcacgatcaacctcgttgacgacagggagagagaatttttgctaaccggcttaaacccgccggctcaagctcatgaaacaaagcctctgacggattggttcaaggaagcagtgaacgtcaatccggatgcgccggcgcttacgtattccggccagaccctgtcttatcgcgaattagatgaggaagcgaaccgccttgcacgccggctgcaaaaacacggtgcgggcaaaggctctgttgtagcgctgtacacgaagcgctcacttgaactggtaatcggcattctcggtgtattaaaggcgggagcagcctatctgccggttgatccgaagctgccagaggaccgaatctcgtatatgctggctgacagtgcggcagcctgtcttctgacgcatcagaagatgaaagaacaagcggctgagctgccgtatacaggcacaacgctcttcattgatgatcaaacacggtttgaagaacaggcaagcgatcctgcaaccgcgattgatcctaatgatccggcatatatcatgtacacgtccggcacaaccggaaagccaaagggcaatatcaccactcatgccaatattcaaggattggtcaagcatgtagactacatggcattctctgagaaagatacattcttatctgtttccaattacgcctttgacgcatttacctttgatttctatgcttctatgctgaatgcggcacggctcattatcgcagatgaacatacgctgcttgatacagaacggctcacagatctgatcctgcaagagaatgtcaatgtcatgtttgcgacaaccgcactatttaatcttctcacggatgcgggagaggattggatgaagggactacgctgtatattattcggcggagagcgcgcgtcagtgcctcatgtcagaaaagcgctgcgggtcatggggccgggcaagctgattaactgctacgggccgactgagggaacagtgtttgcgactgctcacgtcgtgcatgatataccggattccatctcctcattgccgatcggaaagccgatcagcaatgccagtgtttatattctgaacgagcaaagccagctccagccattcggggcgatcggtgaactgtgcatcagcggaatgggcgtgtcaaaaggatatgtaaatcgtgctgacctcacgaaggaaaagtttattaagaacccgttcaagccgggagaaacgctttaccgcacaggggatttagcgcgctggctgccggatggaacgattgaatacgccggccgtattgacgaccaggtcaaaatacgtggacaccggattgagcttgaagaaatcgaaaagcagctgcaggaatacccaggtgtgaaagatgcggtcgttgtggcggaccgccctgagtctggcgatgcatcaatcaatgcctaccttgtgaaccgaacgcagctttcagctgaagacgtgaaggcgcacctgaaaaaacagcttcctgcttacatggtgccgcaaacctttaccttcttggatgagcttcctttaacgacgaacgggaaagtcaataaacggctgctcccaaaacctgatcaggatcagctggcggaagaatggattggaccgcggaacgagatggaagaaacaatcgcacaaatatggtctgaggttctcggcagaaagcaaattggcattcatgacgatttctttgcgctcggagggcattccttgaaggccatgaccgccgcgtcccgcatcaagaaagagctcgggattgatcttccagtaaagcttttgtttgaagcgccgacgatcgccggcatttcagcgtatttgaaaaacgggggccctgatggcttgcaggatgtaacgataatgaatcaggatcaggagcagatcattttcgcattcccgccggtcttgggctatggccttatgtaccaaaatctgtccagccgcttgccgtcatacaagctgtgcgcctttgattttattgaggaggaagaccggcttgaccgctatgcggatttgatccagaagctgcagccggaagggcctttaacattgtttgggtattcagcgggatgcagcctggcgtttgaagctgcgaaaaagcttgaggaacaaggccgtattgttcagcggatcatcatggtcgattcctataaaaaacaaggtgtcagtgatctggacggacgcacggttgaaagtgatgtcgaagcgttgatgaatgtcaatcgggacaatgaagcgctcaacagcgaagccgtcaaacaaggcctcaagcaaaaaacacatgccttttactcatactacgtcaatctgatcagcacaggccaggtgaaagcagatattgatctgctgacttccggcgctgattttgacatgccggaatggcttgcatcatgggaagaagctacaacaggtgcttaccgtatgaaaagaggcttcggaacacacgcagaaatgctgcagggcgaaacgctagataggaatgccgggattttgctcgaatttcttaatacacaaaccgtaacggtttcataaatgaagtgatgaaaggaggagacagccaatgagccaactcttcaaatcatttgatgcgtcggaaaaaacacagctcatctgttttccgtttgccggcggctattcggcgtcgtttcgccctctccatgcttttttgcagggggagtgcgagatgctcgctgccgagccgccgggacacggcacgaatcaaacgtcagccattgaggatctcgaagagctgacggatttgtacaagcaagaactgaaccttcgccctgatcggccgtttgtgctgttcggacacagtatgggcggaatgatcaccttcaggctggcacaaaagcttgagcgtgaaggcatctttccgcaggcggttatcatttctgcaatccagccgcctcatattcagcggaagaaagtgtcccacctgcctgatgatcagtttctcgatcatattatccaattaggcggaatgcccgcagagcttgttgaaaataaggaggtcatgtcctttttcctgccttctttccgatcagattaccgggctcttgaacaatttgagctttacgatctggcccagattcagtcgcctgttcatgtctttaacgggcttgatgataaaaaatgcatacgagatgcggaaggctggaagaagtgggcaaaagacatcacattccatcaatttgacggcgggcacatgttcctgctgtcacaaacggaagaagtcgcagaacggatttttgcgatcttgaatcagcatccgatcattcaaccgtgatcaaaagcggacagcttcggctgttccgctttttttgtgttgaatgccaatttttgcatggtataatagtcgaaatactcaaataaaggcaggtcgaaacatgcgcacgtctcccaggatgaaatggtttgtattgctgtttacgtttgttttcgccatcggaatgaactcattcagaaattcctttcaattttttatgctgccaatggcagatgccttccatgccgacaggtcgctgatctcggtttctgtcagcatttttatgatcacaaccggcatcgtccagttttttgtcggtttttttatcgaccgtttcagtgtcagaaaaattatggcgctgggagctgtctgcatcagcgcaagctttttggtgcttccttattcaccgaatgttcatgtgttttccgccatttacggtgtgcttggcggaatcggctattcctgcgcggtcggcgtgacgacccagtacttcatcagccgttggtttgacacacataaaggtctggcgcttgctattttgaccaatgccaactctgcgggcctgctgcttctctcgcccatttgggctgcggctccgtatcatgccggctggcagagcacctataccattttgggaatcgtcatggcggctgttctgctgccgctcctcgtctttgggatgaagcacccgccacatgcgcaagcggaaactgtgaaaaaatcttatgattggcgagggttttggaacgtgatgaagcaatcccgcctcattcatatcctgtacttcggcgtgtttacttgcggatttacaatgggaattattgatgctcacctcgtcccgatactgaaggatgcgcatgtctctcatgtcaacggaatgatggccgcgttcggggcatttatcatcattggcggattattggcgggctggctgtcagatctcctcggcagcagaagcgtcatgctatccatcttatttttcattcggctgctcagcctcatttgcctgctcattcccattctcggaattcatcacagcgacctttggtacttcgggtttatcctgttattcgggctcagttacacaggcgtgatcccgctgaccgcggcgtcaatttcggaaagctatcaaacaggattgatcggatcgctgttaggcatcaatttctttatccatcaggttgccggagctcttagcgtgtatgcgggcggtttgttttttgacatgactcatggttatttgctgattgtcgctgtgtgcatcgtgtttgtgggtttatcggctgtaatagagctggtgccgtttttagataaacagaaggcaaaagaaacccaccattcaatataaaaggatcagcactgtcaatgctgatcctttttaaatttgagtttttttgtttcggtatttttaaggataatctccttgaatctgttcatctcctcttcggagtgaaaaaaatgtttggggatcgcaatatattggccacttgatgtattgaccctgaagatatttttatattcgaaaacagctgtaatttcatcccaattgaaaatgaggtcatattttttagaacatatacgaattccttcttggttcagagtatatgttcttttagatttcatccgttcgttcttcttgtatgctctggaaaacttcacatatagaagaaggaggagcagcagtgtaaacagaacggacatcacgataatcaacatactgttcataaacaagttaagcgcgtcactgccataaacgatacggggccatccgttaatgaagttaactgcagcaaatatggtgcaaaacaacagaaagtaaaagcatgatatttttgcgatttgataaaaaaagatttctcttacatccttaaaagcgatttctcctggaagattgatactttcactagcatattgaatcatacggtaaacctacacctctaaccatgtttttcctttcagtctagcataatttctcatttttttgcaggcataccagggcgctttgtttttttctccagattgatattgctccccaccacgccaatcataatacaaacagccccggcaagatgataccaggccaggctttcgttgagaatcataactcctgcaatcatcgtcacaatggtagatacatgattaaaagcactcattttaaacgcctcaattcgcgacagcgtatagttagacagaaatgaagtgacaagtgaagacagcacgcccaaatacacaatggcgagaacgaagccgggctcccggaacggcagaaaataagtgccgactgttcccgccgctccgtgacgcacaagggcgatggcgttgaagacgacaaagccgatggctgacatgatgtaggtgagctcggtcagcttgaaccgctgcgtcatttttctggcagcagtattgtacatcgctgaggacaaagcggacaataggatcagcaaagacccttttaagctggctgattccacgtcaacgcctttcatcacaaaaataaacatgacgccggcaacggataaaaccgtgaaccccttttgggtccacgttgggcgttcctttaaaacataagcggcaaagaccatcgtgaaaatcggaatggctgcctgaataattcccgcttcagaggaggacgagtacacaaggccaaatgcctgaaagctgaaaaataacgcgggatacagcagggcgagcggcaaaatggcaatgacgtcctttacgcggattgatagctttacccagccgaataagatcggtacagtggccgcagcaaacgcaatggtgaaccgatgcgccaaaatatcaaacggctctgctgtttgcagtgcgatttttacgaatagaaaggataaaccgataatgaacgaatataaaatagccgctatataagcgggggcttgctgatgtttaaccataatgggaatggctcctttacctgaattgcagcgccggtcgctccctttattgtatggccgcggtcagaacggtacaatgagaaaaacaatgaactgtaccggtacaaaacagggggagaaggcatggagaaatatatgagtctattaacgaagatagaggagatgatgcaaagcaccgcctatcaagaaggagacaggcttccatctatccgtcagctgtccgcccgctaccaagtcagcaaaagcacagtgatccgcgcgctgcaggagctggaaaaacgccaccttatctattccgttccgaaaagcggctattatattgtgaaaaagacgggaaaagccaaaagcgggcagcagggtcccattgactttgccacatctgcgccggatccagatgtgtttccgtatcttgattttcagcactgcatcaacaaagcgattgatacatacaaaaacgatttgtttatttatgggacgccaaaggggcttccatcactcatccgcgtactccgaaagctcttggccactcaacaggtatttgcggatgaacggcatattttcattacatcaggtgtccagcaggcgttatccttgctttgtgccatgccgttcccaaatgggaaagagaagatcgccattgaacagccgggctaccatttgatggtcgaacagcttgagacgcttgggattcccgccatcggggtgaaacgaacggaagaagggcttgatatagccgaggttgagcggttatttcaaacagaatcgattaaatttttttatacgatgccccgcttccataacccgcttggctgctctttgtcagagcgtgataaacaggagcttgtgagactggcagaagcgtatgatgtctacctcgttgaggatgattacctcggtgatctggaggaaaataaaaaggcagatccgctgtacgcatatgatctgtcctcacatgtcatctatttgaaaagcttctcgaaaatgatgttccccggccttcgcgtgggggcggctgttttgcccgaagcgctgactgacacgttctatgcgtacaaaaagctgaacgacatcgactgttcgatgatttctcaagcggcattggagatttacctgaaaagcggtatgtacggcaggcataaggagaaaatcagaaattcttataaagagcggtcgctgaggctacatcaagccattcaaacacacaggcagctgggaagcggacgctttacgttctccagcgggcaggcaccctgtatgcacacccatctggtgcttcctcaggatctgcccgcctcaagagtgattcatagactggaaaaacaaggggttctccttgtggcgatagaccgtcattatttatcagattatccgaaagaaaatctattaaaaatcaatatttccaatgtgaaaacggaagatattgagcgcggtgtcaagctgttgatgagccatttataaaagctcttcgtacgagaccattgtgatatcctcggggaaatcagggtgtgcggcgcatacagccattttgtagccgggatcgacctcatacgttttgatatagcatggggaatggctgtccggaagctcaatggatacttgtccgtcctggtgcaggcgcactgaaaaggaatcaagcggaagcgataagcctttgccttcctgtttgataaagctttctttcattgaccatagatgataaaaatagtctgtctgctcgtccttgtcttttgctaaaaggtcgctgtactctgtttttgaaaagaagcgcttggcgatctcaaggctgatcggtttcgttttttcgatatctatgccgatcggctgtgaatcaaacgcgcaaatgacccagcgtccggagtgagaaatgttgaaatgagcgtcgggaagatcagggatgcacggcttcccgtattcctgcgtgctaaagcggatatcggatttgtccaactgatactgcctgcttatgactgagcgaacgagcacatctcccagcagggtgcggtgagcatcttctttatgataaaatctccggcatttctcccgtttttcaggtgctatgaaagacatgaaccgttcattttcttcctgtgaaagcgggcggtccatataaattccgtaaatcttcattctagatcctccgtctgcaaaagattgtcaaaaccatcctatcatacttccacaagactcatatagaggagaaaataaaaaaacaaagccaaggcggctttgttttagtggacaggcggagatgctttcacagcggctgtccgccttgccacagcataattcagcagctggattgactgcggcaatgaaaaacgcagaatgagcccggtgaggatggcggtcaaaatggtgccaaaaccgatcggcccacccatgccccatgccgcaaacaaaatggttaattccatgccgttccgcacccattgcacattccagccggttttttctgtaatcagcatcatcagtgaatcacgcggccccgcgccaaggcctgctgatacataaacaccgacgccgtaaccgatcagcaccacgccgagagagaagacgatgatcgagcctgtgtaggtcgagggggcaggcagaatgaaattgaaaaaatctataaatacaccaatgagcaccatattcaggagggccccaattttcggccaagctctcgtaaacaatgacgtgaatccgacgatgagcgctccaataatgatggaccactggccgacggtaagcccgaagtgctgaaacaggctgtaatgaaatgcatcccacggactaatgccgagtgcttttccttctatcgtcagggatacaccaaaagccaaaatgatcaaaccggcaaaataaaatgtccagcgcagaacaagttcttgcttcacgtgaggtcccttctttcgtaaaaatcagtcgattgtcattgtagcacatctgacagaagggcggaataggcgaaaggggctcaacaaaaaaacagggccgccgcaggcgccctgtttcagcgtgttggtaaacccttgcattcgttgtcaggcctgtgcttcggtgctcacgaatttaacattcgctgtgctccaatgctcgcccttcctagacttcaaaggttttcaatcacgctgaaaatcacaaaatcctaaaacgaatatcgttttaggattttgtcaataatctgaaacagggcgcgggcgccctgtttttcttattacagcgggttcaaaatccggttcaagaaccgctgtgtccgttcttcttttggtgcggagaaaatttgctccggcggtccttgctccacgataacgccgccgtcgatgaagatgacttcatccgcaacctcctgcgcgaacttgatttcgtgggtcacgacgaccatggtccagccttcattggccaagtccttgataaccttcagcacctctccgacaagctcgggatcaagcgctgaggtcggttcgtcaaacagcatgagctcaggctgaatcgccagtgcgcgggcgatgccgacgcgctgctgctgtccgccggaaagctggaacggatataaatccattttgtccttcaatccgactttatcaagaagctgaatcgcttcttttctgacttcctctttgttccgtttttgcacctgaacagggccctccatcacgttttcgagggctgtgcggtgcgggaacaggtgatacgcctgaaacaccattccggattttcggcgaagctttaggatatccgcctgtttcacctttttggagaaatcgatggagaaatcatcaaatgcaagctctccgcgattcgggatctccagagcgttcaggcagcggagcagcgtcgttttccctgaacctgaaggcccaagtatggcgatgacttttcctttttcaatcttcatatctatcttttttaaaatttcattttcaccgaatgatttgtttaatcctttaacggtaagcatactcggaacctccttatttggccacgtagcggtcaagacgccgttcgatgacatgctggacgagtgagagcaggaagcagataatccaataaataaaggctgcttcaatatagatcactaaaatttgatcaagattccgcgcgccgatttcctgggcttttctgaacagctcagcgaccagaatttgagaggcgagggatgtatctttaatcaggctgataaaggtattggataatggcgggatcgacacacgaaacgcctgcggcaaaatgacgcggaacagcgttttttgatgtgtcatgccaattgtgtagccggcttcccattgccctttcggcacggataaaatagatgctcgaatgatttcagatgcataggcgccgacgtttaatgaaaaggcgataactgcgcttggaaatggatctaatgtgacgttaaaggccgggaacagatagaaaatgatgaacaattgaacgagaagaggagtgccgcgtattgcggatacgtatacgctgaacacccatctcaaaggtctcactttcgacattctggcaagcgccgtaatcagcgccaggatcattccgaatataaaggaaagaatcgtaaggggaatcgtatagtagattccccctgaaagtatcggccagaatgactgctgcaccagatcccacgggatcgccgtgccaagcgtcaatgccggcagattatttagaaacatcttcgccgaaccattttttagaaattttagaaagagtcccgtcctctttcatttcttttaatgctttgttgacttgatcaacaacctcgccgcttcctttacggaacgtgaaatatgttgactgaggctcacctgtttcaaacgcgattttcacgtttttattgccagatgtttttaagtagttcaatacggcaagcttatcgttgtatgtcatatcgacgcggccttgctggatcatttgaagggcctgcgccataccttcaacgccttctactttagcgccggcatttgtagctaatttgttgtagttgcttgtcagtgattgagctgacgtttttccttttacatctgcttcagacttaatatcgttgttgtcttttttcgttacgacaacggctcttgatgttgtgtatttatctgagaaatcatattgattttcacgatctgtttttccgacttggttggcaacaacgtcaaaccgtttggaattcaggccggcaaacatactgtcccactgtgtttccttaaagtcgactttaagcccgaggcgttttgcgacttctgtgataacttcgacatcatagccagtcagtttatcagtgtctttgtcgtggtaagtgaacggctcatatgttccttccgttccgactgtgagcacaccttttttcttaattgaagcccaaagatcgccatctttggcattatcttttgactgattgtcatttcctgctccgcaagctgcaagagctgcaatacttacgaccatgaataaagccaataatgcttttttcatcttattccccacttttctggttgattttattgaaataaaaaaatagcttacaaatctaaaggataacttttttttagtatgagtcaagtaattggttttcataaggcaaaatcttttaaaataaatccaaaaattgctgtgccggtttaggcaaataactgtccgttctccacatgacagccggtgtcataatgaagggattattttcgatatgaacggtgcgaacgtgatttctcatatgaacgggaatcattgtgacgggcaaaatagacgcgccgaatccggatgacacgaggctgagcaaagttgcagagtcgtggcattcacaaacaatgcgcggctccaggttcaaacgatgaaattcattcatgacctgattataaacgccttttccgttgacaggccgcagcaggatcagcggaaatgaaggaatgtcctccatcttaatggtgtctccgcacggatatccggcttcatctgaaagcacgagcacacatggaatgtcatcaagctgtttgaattgtactgtgtcacttttgatcagtgttgtcgtgaccgccgcatcgatttgccggctttccagcagctccaacagtgtcgcgggttcattttcccaaatattaaaggtgagatgggggtatctctctttgatctgtgttactttttcaagcatcagagccgcgcaataaatcgttgatcccacggcaagtgtgccggctacttcctccttcagctcctgtacctcaatgactgcatcttcaaacctatgcagaatctcttttgctctttttagaaaaacagctccttcatatgtaagagtcatttgttttttcttgttacggtcaaacagaacaacaccaagttcgtcctccagctgtttgagctgcctgcttaaaggcggctgcgccatgtgaagctttttggctgcggacgtaattttctgttcttgggcaatggtaatgaagtatcgaagctggcgaatatccaaaagaaagcgcctccttatcataccttttaggtattaaatatagatttaatagatatttttcatatggatatatcaggagtatgattgaaatgaaagcagaattcaagcgtaaaggagggggcaaagtgaaactcgttgtcggaatgacaggggcaacaggggccattttcggggtcaggctgctacagtggctgaaggccgccggagtggaaacccatctcgttgtgtctccttgggcaaacgtcacgatcaaacacgaaacaggctataccttacaagaagtagaacaactggccacatacacttactcacataaggatcaggcggcagccatttcaagcgggtcgtttgataccgatggaatgattgttgcgccgtgcagcatgaagtctctcgcaagcattcgcaccggaatggcggataatctgctgacacgtgcggcggatgtcatgctcaaggagagaaaaaaactcgtcctcttaacgagagagacgcctttgaaccaaattcatctcgaaaatatgctagcgcttacgaaaatgggcaccatcattcttcctccgatgccggcattttataatcagccgagaagcttagaggaaatggttgaccatattgtttttagaacgttggaccaattcggcattcggcttcctgaagcgaagcgctggaatgggattgaaaaacaaaaaggaggagcttgatcatggcttatcaagatttcagagaatttctcgctgcccttgaaaaagaaggacagctgcttacagtgaatgaagaggtaaagccggaaccggatttaggggccgccgcacgggcagccagcaatcttggcgataaaagccctgcgctcttatttaacaacatttacggctatcataacgcgcgaattgcgatgaatgtcatcggctcttggccaaaccatgccatgatgctgggcatgccgaaagacacaccggtaaaagaacagttttttgaattcgcaaagcgttatgaccagtttccgatgccggtcaaacgtgaggaaacagcgccatttcatgaaaatgaaatcacagaagatatcaatttgttcgatatactgcctcttttcagaattaaccagggtgatggaggctactatttagacaaagcatgtgtcatttcccgtgatcttgaggaccctgacaacttcggcaaacaaaatgtcggcatttacagaatgcaggtcaaaggaaaagaccgtctcggcattcagcctgtcccgcagcacgatattgcaatccatctgcgccaagctgaagaacgcggcatcaatcttccggtcaccattgcgctcggctgtgagccggtcattacaacggcggcatcgactccgcttctctatgatcaatcagaatacgaaatggcaggcgcgattcaaggcgaaccatatcgcatcgtcaaatcaaagctgtctgatcttgatgttccgtggggcgctgaagtggtgcttgaaggtgagattattgccggagagcgcgaatatgaagggccgttcggtgaattcacaggccattattccggcggacgcagcatgccgattatcaaaattaaacgcgtctatcacagaaacaatccgatctttgaacatttatacttaggcatgccttggacagaatgcgattacatgatcggcattaacacatgcgtgccgctttatcagcagttaaaagaagcgtacccgaacgaaattgtggcagtgaacgccatgtacacacacggtttaatcgcgattgtttccacaaaaacccgctatggcgggtttgcgaaagcggtcggcatgcgcgcactcacaacgccgcacggactcggctactgcaaaatggtcattgtcgttgatgaggatgtcgatccattcaaccttccgcaggtcatgtgggcgctttcgaccaaaatgcatccgaaacacgatgcggtcatcattccggacttatctgtcctgccgcttgatccgggatccaatccatcaggaatcactcacaaaatgattcttgacgccactacaccggttgcgccggaaacaagaggccattattcacagccgcttgattcgccgctaacaacgaaagaatgggaacaaaaactaatggacttaatgaataaataaggaaaggatgttcgaaatgcatacatgtcctcgatgcgactcaaaaaagggagaagtcatgagcaaatcgcctgtagaaggcgcatgggaagtttatcagtgccaaacatgcttttttacatggagatcctgtgaaccggaaagcattacaaatcccgaaaaatacaatccagcgtttaaaattgatccaaaggaaacagaaacagcaattgaagttccggcggtgccggaacgaaaggcttgatccgcgtgaactgtatgtcagaccgcctctttgagctgcttgacgggagctgcctgaatgagaagcagcatgaggccttcgttctgcaaacagtatcagaggatggctggccgcatgccgctatgatcagtgcaggtgaaattatcgcgctgagccgaattgatatccgaatcgctctgtggaaaaacacaatgacttcggccaacatccttcgcacaggaaaagcacagttcacggcgtggtggaagggagcggcctattatgtaaagcttgaatgcgcgcctttaccgcctttgaatgatgctgaatatgatagagaccgtttttcctgccgcatcgtttcagtgaaggaggacgttgcgaaatacgctgatttgacttcaggtgtccgtatacagcttcacagccctgaagaggtgctgagcagatgggaaaagaccctggaagatttaaagcggtaatatcgatagcctgacgccatgcgtcaggctttttttatataatgaaaacaaaagggggcgtgagaaatggaacgtgcggggatcagtcactcggacggctttgatttagcttatcgaattgagggcgagggcgcacccatccttgtgatcgggagtgcggtttactatccgcgccttttttcctcagatatcaaacagaaatatcaatgggtctttgtcgaccataggggatttgctaagcctaagcgggagcttcgtgcggaggattcgaggcttgatgccgtcttggctgatatcgaaaggatgagaacatttcttcagcttgaggatgttactatcctgggacattccgggcacgcttttatggctttagagtatgccaggacatatcccaaacaagttcggaaggtggcgctctttaatactgcgcctgataacagtgaagaaagacagcgaaaaagcgaatcatttttcatggaaacagccagccttgagagaaagaaacgatttgaaaaagacatcgcgaatttgccgcaggacatcgacaaagatcctgaaaggcgcttcgtgcacatgtgtattcgcgctgaagcgaaaagcttttatcaagagcggccgcatgctgctgccttatgggacggtgtattcacgaatatgccgatcattgatgaattatggggcaatacatttgcccggattgatcttattcagcggttagctgatgttcgtatgccggtgtatattggattagggagatatgattatttggttgcgcccgttgcgctatgggatgcagttgacggtttatatccccatgtggataaggttatttttgaaaggagcggccatcagccgatgctggaagaaccggaagcctttgatcaaagcttcagcaaatggctggatcaataaaaaaacagcccgcagatcaaaatccgcgggctgtttctgattataagacccctttcatcgcgcgtttgataaccggcgagagcagcaggagaatgccgccaagaacgatagaaatcaaaccgatggtgccgaagtacattgtttcaggaattttatcaaacaatccggctacttgggcattgatcgcttgtgctgctgcgttcgtcagaaaccacatactcattgtctgtgcagagaaggcagctggtgccagtttcgttgtcacggataaaccgactggagacaggcacagctctccaagcacgacaagcaggaagctgagaacgagccaaagcgggcttacgagtgcttcttttccttgcatagcagggaataccataatgataaatgacaatccggctaaaataattccgattgagaatttaactggtgtagacggctggcgtttgccaagcttcatccagagccatgcgaatattggcgcaaaaatgacgacaaacaatggatttaatgattggaaccatgatgactgaagttcgaatccgcccaatgaaagtcttatgcgttcatcagcgtataccgcaagaatggtcgctccctgttcctgaatggcccagaacatgacagcaccgataaacaaaggaacgtaagcggcaagacgggatttttctgttttgtccgcttttttgcttgtaaacatgatgatgaaataaatcacaggaatcaaaataccgagaatacttacaaggtcgataaaacgattgatcgtcagcacgcctgtttgtacagagataatcactgcgatcgccacgatgataacaccgattccggtgccaatcgcagattttttagacagcggattcggcacattggaacctgcaagcccgaggtttttctttcttgtcaaagcaaaaacgataagtccgagaagcattccgaccgcggcagctccgaagccgagatgatagttgtacttctgtccgagtgttccgacaattaacggcgcaagtaaaccaccgaggttaatccccatgtagaaaatactgaaacctgagtcgcggcgcgggtcttctttcgtgtaaagatccccaaccacgcttgaaacgtttggttttaataagcctgttccgacaatgataagcaccatgctgatatagaatgcgatcgcgctgcccggataggcgagtgcaatgtggccgaacataatgaatatgccgccgtaaaacacggtgtttgcggtaccgaatacccggtcagcgagccatccgccaataatggtggacatgtatacgagtgatccgtaaatcgacataatggcaaccgcagtgcccttgtcaaagccgagccctccgtttaccgtctctgtatacaaatagtaaagtaagattgctctcattccatagtaagagaaacgctcccaaaattcggtgaaaaatagtgtaaatagtcctcgcgggtgaccaaagaaccctttttgcgggacgcttttaatgatactttcgttatcaatcgaagccatgtcagccaaaccctttctaaaaaaagtgtattataaaaatcatattcttatataatacttgtgtcaatataatttatactcatttcaaatagttccatattggaaaaattataaatacctaaaaatagtgatttcctcctaatttttaaactttttatcgtgagattttcttacacaactattcctttatatttttttaataaaattttagagaaatgtacaagcagatcgggcctttgtgagtaacatgatagtaatcatagagaaggaggctcgcaattggctgaattcatattaaatgcagcggatttcggtgttcctggagatggtaaaacggattcgacagaacggattaatcagtgcctcagtacagctgtatcgaaaggctatcatactgtctggtttccaaagggaacatatttaatagacgcaacgcttggcggagatcttaatcagaggtttcgaaacgcggggatcattgttcccggcaaccttgagattatgatggaccccgaatgtatcatgaaagtgatcccgaatagttcgtggggttattccgcattttatgtgggcaagcaagagaatataaccatttccgggggacaaattatcggcgaacgggatgagcatacgtatgcctcggcagggataaggtcaacccatgaatggggctttggcatatgtattgaaggatgctcgaatgttgtcattgatgatgtgaaaatttctgattttaccggcgatgggatcatagtcagcccaaggggattaaagaccaatcaagattatcgaacgtcagagcaaattatcatccgccgctgtgaggttcggcggtcgaggagaaataacatttccattaccggatgtgacatggtcacggtggaggaatgcttgattgaagatgccggaacggggaatggaacagcgccgaaattcggaattgacattgaaggatatggcgaaggtgatgttgattatgaggaaccgattaatgtatcaattcgcaataaccactttgttggaaacgtttcaagttctgtgaccaattttaacgggtatggcattttaatagaaggaaatcactctgacaatacaatcagctacggatatgggacgcaaacagtgatcaagggcaatattctgagacgccctgaagacgcggcggctgcgccaagagtcgggataaccggactcggtgtatcacaaggaaaagagaccagtgatgcagtgatcgctggcaacctcattaccggattttcaactggaattgatgtcagaggaaagagcgttcttgtgacgaacaacaaaatcagcaactttgaaaacacagggatattggtttatcagtcttccgatgtaaaggtagacggaaaccaaattcaaaacggactgtctgaaacaaggcgcagcatcggtcttcgcgcagtgctgtcagatgacatcgcttttctgaataactgtctcattcaagtcgttgacggtgtgaacgtttccggcggaaatatgatcattaaagataatctcctgagaaaattcagccggggcatttggattgctcaagggaacgcggtgattgaagggaatacactgaatcctgacgcgtttgaagcagtgccggaatcatattctgtttccgtcacaaacaatgccggcgccatcatcaaaaacaatacatttaaagagttcaaaaattaccccatttattgctccacaagtgcaaaaacctcaattatcggcaaccacttagagcgatccccgcttttggtcaccatctatatcagcgcaggtgtgcatgagatttttgataataccatttcagtcaacagaacagccgggaatccgattgtgatttatctcaatggctctgcaggctctatcatctctggaaacaccatcaataacctctccgcgggcactgcgacagctattcaaacaaacacgtcaaccaattccaaaatcatcggcaaccgcatttttaaagggaccatcaacaaacacagcagtgatacaatagacggcaatatgattgtctgaaaaaagcgcccccctttaggggttcttttttttcgatttatagatcacgtacatttctctcacaagtactaacacaaaaaataaaagcacgacccattccgcaaatgttgtcatcttaaagctggacatattgttataaacggcttttgttaaactgaacccttgaagcatgtccatcaacacagaaatagctaataaacaaattaatatgactccggtcacgcccaatatcttcatgcttcatcatcctccgcttttagtgtctatctttggcggagaagttataccgcatctaaccctaatgcataatctcaattttaaaaggaagaatatgagaaaacgacaaggaaaggtatttgtgtatgcctttattttctaagcgaaagaacaataccgattcaaaagacaagcagaatacagacgaaaggaatcaggaacagcagcaagaaaaagaaaggccggttctcatttctccaagtttggcaaagaatatagcggaaacgaaaaaggaagtcggaagcagctctgacgtcatcattcgcgagattaaaatcggggagcaggatcatgtccacctagctgttatctatattgctgggctggtcgataataacacgatccatgagtcgttaattgacccattggtacaggatgagtctatccagaatactcatgcgatccagcaaattcttgaaaaaacgctcccgctgggcggggtgaaagcggaaaagagctgggacaagcttttttccgagttaatgctcggcaatgcgctcatttttgctgatggccatgatgaagctttgatttgcagcactcaagggggagagcagcgctccatccaagagccgagcacccaggtgtcattccgcggcccgcgccaagggtttacagagtctctgcaaaccaatatttccatgatccggcgatacattaaaaatccgaatttatgggttgaaaaaatgaaaaaaggttctgttacgaatacggatatcgctctcatgtacattcaaggaatatgcgatgaaaaggtgctgaaagaagtgaagcagcgcctggaaaaaatagatattgacagtattttggaatctggatatattgagcagctgattgaagatgaaacctttacgacgtttccgactatgtatcatacagaacgccctgatgttgtagcgggtaatctgttagaaggaagattcgcgattattgtggacggaacaccgtttgtgcttattgccccggccttatttgtccagttttttcagtctgttgaggattattattcgcgttttgacattgcgacaagcataagaattcttcgtgttttagtctttttcatttcgcttgtggctccggctgtatacgtggcagccacgacgtttcatcaagaaatgataccgactcagctgttagtggtcattgcggcccagcgggaaattgtcccgtttccggctgttgtggaggcgctgacgatggaggttgcttttgagattctgagggaagcgggagtcaggctgccccgggttgtcggctcggcagtgtcaatcgttggcgcgctcgtaatcggccaggctgccgtacaggctggtatcgtctctccggcaatggtgattatcgtggcactcaccgcgattgcgagcttcgcaacaccggcgtttgcaatggcgatttcagcccggcttattcggtttatctttattattgcctcagctgttatgggtttttacgggctgattttagggatcattatgatgtttgtccacttatgcagtcttcgttcattcggcgttccatatatgtcgccgcttgcacccttttcttcacaaggcgtaaaggacgcgcttttccgggttccgtggtgggccgatgaaaaaaggccggaatcggtcagcaaggaagataaggtgcggcaggggcaagatcaacgcccagagccggccgcttcacgaggaatggtgaacaaagatttggaagaaggggatcagaatggtacgtaaatgtctattagccgttctcatgcttttgagcgtcattgtgctgcccggctgctgggataagcgggagctgacggatcttgcgattatctcggcgattggcatcgatcggacaaacgacagcaactacgtgctgcatcttcaaattatcaatccaggaaatgttgccggcggccttcagggaggcggtgctggagacaggccgcctgtatctgtctattcaattgaaggcgacaatttgacggaagcactcagaaaagcctccatgaaggtatcgcggcggctttattttgcccataccaacctggtcgtaatcagcgaaaagctggcgaaagaggaagggctggattttgtattagacaatcttgaccgggacacggaattcaggacaacggcgaccttcgtcgttgcccataaaacaaaagcagaaaatatcgtgaaaatcctgacgcctattgataaaattccgtcaaacaaagtcaataaaaccctcgatttcacggaggcgcaatacggtcgggtggtcaaaaccaatattcaggacgttttgaaaacacttgccagcgacacaagggcaccgattattccgggttatttgatgattggcgatgataaaaaaggagtcagcatggaaaacacgcaggcaactgacccgaaagccattcttcaggcagacggattggcgatttttgacaaggctgggtatttaaagtattggattgaagatgatgaaagcgtgggggcagtctggcttatgaataaggtccagcatacgtttattaatgctgattggggcaagacgaaggatgcggtcagcttgcaggttacccatcaagatacaaagctggtacctgatatgcggaacggacgtccgcacatccatgtgaaagtgacggttgaaggaattatagatgctgtcaaataccctttccaattgtctaatccgaaggtgctggccgctattgaaaaagcgctcaacaaagagcttgaaaaggaaatcagccatactgtgaaaaagatcaagaagaataagatagattttgtcggttttggtgacacgatatatagaaagtatccggagcagtgggagaaaatgaaggacacttgggacaaagaatatttgccggaactgcccatcgatgtgaaggccgagacgtatatcagaaggacgggattgcgaaacaatccgatcaaacaccagtttaaagatgattaggtctgaagaaaggggaagtgacagatggaaaaagccagaataagcataaggcagctgtttgtcatgattatcatttttgaactgggcagctccttattgattacaccgggatcaatggcgggcagggatgcttggatcgcagttctgttggggtgtgcggccggtttgtttcttttctatttgtatcaaggaatttatcaatgttaccccaattcttctccgaaagaatatatggatgatatgctgggaaccaagctgagctggctgttttcatttctctatatcttgtactttgcctatattgccgcaagggtcctgcgtgactttggagaaatgctgctgacatttgcttatcatgatacacctatcattattgtaaatggtttattagtgatagtaagcatatacgctgtaagaaaaggaatcgaagtgctcgcccgcgcggctgagctacttttcggagccatgtatttactgggcgcgatcggcctcgtgctgattgttgtctcaggttctatagacccgcataacttaaaaccggttttggcaaacggtatctctcctgtcctttactcagttttcactcagaccatgtacgttccgtttggcgaagtcgttttatttgtgatgattttccctaacctgaatgacagaaaagatgtgaaaaaaatggggatgattgccatagctattagcggattggttgtggcgctcaccgtggcgattaatatcagcgtgcttgatgttgatcttacactcagatcccagttcccgcttttaagtacgattcagacaatcaaggtcgaagaatttttagaccggctcgatgtcttttttatgctggcgctgatcatcggcggcttctttaaggttagcctctacttatatgccactgtggttgggacatctacgctctttaaggaaaagaacccctctcaattggcttatccgatgggattgggcatcttaatcctttctataacgatcgcgactaacttttcagagcacttgaacgaaggcttgaaagtggtgccgctgtatattcatttgccttttcaattattgtttccgctctttctgtttattgtggctgtttggaaaaagaaacgaagagagaagtcaaaagggacaggagcaaaaaaatgataaaaagagcggggggatgcagccgccgctctttttatgttcacttctatataaaagggggatatagggtgcgcccctgtctgcactggcagaggcgcgttttgttatacgactgcgacgttttccttcacagtaaagcttcctcttgaaagtctgatattgatgtctgacacttttgcaatttgttcatcgtgcgtcaccataatgacgcatttatcttccttgtgcgccagatcctgaaagagccgtacgatctcttttgatgtgtcctcatcaaggtttccggtcggttcatcggctacgataagatccgtgtcacagcagaaagcccttgtaattgatacccgctgctgttgtccgccgctcagtgtgagtactttttgccgggcttgtttttcgttgatgccaaccttctgcagcatgtcaagcgcatatgattcgttgttcttttctttagaacctgtgatttccatagcggttgtgacgttctgcaaagccgtcatatacgggagcaggttgtacgcctgaaagacgattgatacatattgatttctgaaattggttaagccgattttagaaaccgcttttccgccgtaaaggatgtttccttcttttggtgcgtcaagtccgcctgccagagacaggaaagtggttttccccgtccctgatgtgccgacgattgtgtagaatttgcctttttgaaagccgatgttaatatcctgaaacaatggctggcttttgtctttataccagtagccgacttgttgaaattctaataagctcataggttccgcctctttctattcctgttttgtcaatatcgttttcggatgaagccgcagtactgaaattgacggcagcaatgttgcaatgattgcgattaggatgccgatcccgccaagaataagcatgtcgttcatagaaaccgcgacgttcagtgaatcgataacgtccacgtttgatgaactgtggccgaacattttgccgcccatgccgccgccgggcatttgtccgcttgcggtttgcgttgaatcggttgatgaactgatttgctgggataaaagctgatttccaagctgatttgcgacgagatttcccgtcacagatgcaaggccgatagcgataacggccacaatcagaatctcagtcaagaactgtccaatcaatttccatcgtttttcaccgatggccattaacacgcccatttcgtatttgcgctccctgattgacatcatgacaatcaggccaagaatgacggcgcctgccactgatacaagatacaccacgtttttagagaaagaagccacattttcaatcggtccgaccatttgctggtaaagctgatcgtttgtattcagtgtgtacgtatcgaagtcaattgatgttttcttcgctgcttttacgaaagcatccatatttttcgcgtcgtccatatagtaaacagctgagtcaatcgtatttttatagtcgtcgcctttcagcgccgctgttgctgtgtaaggcgtataaagcttgttataaggatttaagaaagagaaattttgggcttggtcatcaccagaagatgttgttttataaataccgacaatcttcagctttaccgtcgtatcttcatctgttgctgattcaattgtgatcgaatcgccaacgctcaaatcattttcttccgctaatgtttcgttgatcactgttacttttttgccgacatctgattttgtaatcgcgcgtccgtcagtgatttttgaatccccgtcagagaaatcatcaactaatgctgtgctgatgacaccttcaatcgaaagatcagcttgaaccatttgcggtccgccttgtcctccgccttgactgtttttagcgtttgagcttgaactgctggagctggaatcacttgaactagagctttcaatcgcatcaaagtttcccgcgttggctgaagctgatgtggtgtaattgtagctcttcacatgatcaagcgctgcaagcttattcgcatcagacactttgatcggtgtggattcgaagctgcgcttttcaccgctgtcctgctgtttttccatttgcttttggcggtcaacctgaagtgtcacgcttccgccgagttcctgtctggccagttcgcttgatttttgtgctgccgactggatggtaaggcctgatagaacaaagacacatatgactgtaaacacaaataattgcaataacgtttttccctttttagccttcatattccaaaaggcccgtttgataaagttcatttatgttcctccgtataggtttttttatggataagaccgcctctggggcgcgcccgctgataaattaatagtagtccaaaggtatgaaaaaaatatgaacaatctatttctagttgatgaaataaaaactaacaattgtgaaacgcaaaaccttctgtttaaaatggtgctattatataaaaaagcatcaaaacaaccggaggatataatgaaaatattaatgatagaagataatgttagtgtatgtacgatgacggagatgttcttttttaaagaaggttttgaagcggaattcgttcatgacgggttagaagggtaccagcgttttacggaagaaaattgggatctgatcattttggatatcatgcttccatctatggacggcgtgaccatctgcagaaaaataagagagacaagcacggtgccgattatcatgctgactgccaaagacactgaatcagatcaggtcatcggttttgagatgggggcggacgattatgtcacaaagccgttcagcccgctgacattggttgcccgcatcaaagccgtcatcagaagatataaggcgacaggcaaagcggttattgatgaagatatgattgaaacggaatgctttaccattaataagaagacgagagaagtattattaaacggagagcctgtagaaaatctcacgccgaaggaattcgatctgctttattaccttgtccaaaatccgcggcaggtgttctccagagaacagctgcttgagcaggtatggggctatcaattttatggagatgagcgaacggttgacgttcatatcaaacggctgcggaaaaagcttgccagcgaggacaagcctttcctgtatactgtgtggggagtagggtataaatttgatgaagattaaatatttatatcagctgctgctaagccatatcagcattttgattttagcgtttgtcattatcatttctctgttttcccactttgtgaaggaatttgcctatcagaacaaagtagaggaattgacgtcatatgcggtgcagattgcaaatgaattccaagccggccaggtggacatgcgcaggctctatccttatcaggacatgttaagcacaagaaagacgcagtttatcatctttaatgaagagcagcagccctattttcttcctgaaggctttcatcacccaccaagggaacagctgaagaagtcagaatggaataagctaaaaaaagggcagactgtcatgatcagggcagatggccgttttgatgatgaagtgtcacttgtggcgcagcctatatttgttcagaacgaatttaaaggcgccgttctgctgatttctccgatcagcggtgttgaacagatggtcaatcaggtcaacctctatatgttttatgctgtgatcagcacgcttgtgattacgattctcgtgagttggcttctgtccaaattccatgtcaagcggattcaaaagctgagagaagcgacagataaagtggcttccggcgattatgacatccatttggaaaacagctacggggacgaaatcggcgttctggcgtctgactttaatatcatggcgaaaaaactaaagcagtcaagggatgaaatcgatcgccttgagaagcggagaaggcagtttatcgctgacgtgtcacatgaattaaaaacaccgctgacgacgatcaacggtttggttgaagggttgaacagccatacgattcctgaggataagaaggataaatgcttctcgctgatcagtgaggaaacgaagcgcatgctgcggctcgtaaaagaaaatctggattatgaaaaaatcagatcccagcaaattacattgaacaagctagacgttcctctgatcgaggtgtttgaaatcgtgaaagagcacttgcagcagcaggcggaagaaaaacaaaacaagctgatgatccaagtagaggatcacgtcatcgtacatgccgattatgaccggttcattcaaattctcgtcaacattacgaaaaacagcatccaatttacgaaaaacggtgacatttggctgcgcggaatggaaggttataaagagacgattattgaaattgaagacacgggtatcggcattccaaaagaggatattgagcatatttgggagcgattctataaagcagatatttcaagaacgaacacggcatacggtgaatacggactcggtctctcgatcgtcaggcagctcgttgaaatgcaccagggcacagtagaaatccagagtgaagaagggaaaggcacaaagttcataatccgccttcctttaacggcaaaacagcaatagcatacagggcggcgcatcaattgatgcagccgccttttttgcacaccgcttcggtttattgcgtgctcccgaaaacaaagattgcgtgtttttcgggttgggacggtctataaacatgataaaatatgacataaacagtttttgatgggagagggtgaaggaatgaagagcggggtaattccttcttcagcggtcggtcaaaaaattaacgagtggtacagatatatccggacattcagcgtgccggatgccgaagtgttaaaagctgaaatccagcaggaactgaaacacatgcagcatgattccaacttgctgctttattattcactaatggaattccggcaccagcttatgctggattatcttgagccgttagagaaattaaatatcgaagaccagccaagcctgtctgaattatcaagaaacattgacagcaatcaggcagatctcaaagggctgctcgactattacgtgaatttttttcgcgggatgtatgagtttgataagcgggaatttatttctgccattacatactataaacaggcggagaaaaagctctcctttgtcgcagaccatattgaacgggctgaattctattttaaaatcgcggaagcttattattatatgaagcaaacgtatttttcattgattaatataaaaaacgcctatgaaatttacgtggagcaggaaacctataatgtgagaatcattcagtgccatttcgtgttcggggtcaacctgatggatgaaagaaatttcgaacaagccgcacgccatttcaaattggcgctcaatatggcccaagcggaacaaaaagcccagctggtcggaagagcatactacaatctcggattatgctattacaatcaagaccttctaggccctgccattgattactttgaaaaagcggtctccacgtttgaaagcagcaggatcgtcaattctctcccgcaagcctattttttaatcaccctgatttattataaacagggaaaacatgataaagcttcggaatatcacaagcggggctatgaatatgctaaagaaacagacgatgcagactatgccgtaaaattcgagtttttgcaatccctatatcaggatcagcccaatgaagaaggaatcgaacgatgtttccaatacttaaaaaataaaaatatgtacgctgatatagaggatttagccctagaagtagcaaaatattactatgaacagaaatggtttaaactgtctgcttcctactttctacaagttgaagaggcaagaaaacaaatacaaaggagtgaaggtttgtatgaaattgaaatctaagttgtttgttatttgtttggccgcagccgcgatttttacagcggctggcgtttctgctaatgcggaagcactcgactttcatgtgacagaaagaggaatgacgtaagaacaagccccttctcattagcgagaaggggtttttcttttcaaaaaaacaccgcaagacatagtcttgcggtgccgccttcatggagattacgtttatttagtagcctcctacaaatgcagttcccacaatgatcaagaggataaataacacaacaatcaaagcgaaagaagttccgtaacctgacattttgtgcacctccttgcgagattgcttcagcaaatgctgcaaaactgtggcggacagggtcccgcagagacggtcagcagcttagaagccgccaacaaacgcagtccctacgataattaatagaataaacaatacaacgattaaagcgaaagaactgatgccgccgtaaccgccgccgttagagtatcctgacataaggtttcacctccctatgaaggatactataagatatgctgaaccgatccatttggcagggataatagtggacaagagaaaaaatgaagaattcggctatatgaaggtgatataaaaaaatagcgggcgctgccgcccgctatttatgtacgattaagagatcagcacgcccgcgaaaaattcctggtataacgcttgaacggcttttctttcttcggcttcttttacgccaaacatcatgctcacttcagaagacccctgattgatcatttcgatattcacctgtgcctctgataatgctttggcggctcttgccgttgtaccgacattgtggcgcatcgcttcccctacaaccataatcagggcgagatgatgctcgacgatgacttcatcggcatgcaaatcctcttcgatccgtttgatgacgctgcgttcagtggcggcatccatttgcccctgccgtaaaatgattgtcatgtcatcgattcccgatggaacatgctcatacgtcaaaccatgctcctccaggatttgaagggctctgcggccaaaaccgatttctctgttcatgagatacttgctgatataaatgctgcaaaaaccggtgtcgctggcaatgccgacgacaggcccgtttgtgttatcccgcttgctgacgacgcgggtgccttcggctgaggggttgttcgtatttttgatctgaacaggaatccccgctctgaatgccggaatgagcgcttcatcatgaaacactgaaaagcccgcgtaggacagctcccgcatctctctatatgtcagctcgctgatttcctttggattctcaacgaaggacggattgacagaatacacagcgtctacgtctgtaaagttttcgtacaaatcggcttgtagtccgttggcaagaatcgaaccggtaatatcagaaccgctccgtgagaatgtgatcacatcgccatccttgctgaatccgaaaaaaccgggaaaaatgatgagtccgtcacgttcccgaagacgatagaggttttgataggattcaggaagaacttgcgcgttgccgggttcatttgtcacaaagaggccggcatccttcgggtttacatatttcgctttgacgcctttataacggaagtaagcggcgatcagtttggcattgttatcctctccgctggccttgactgcgtcaaggtattgttcgggattgcttttgtctccttctaaaagcgtaaacagatcatctctgattttttcgataatgctttgccccagctgaagctcattggcgatgagagcgtaccgttccacaacagcttccgccagttcaggtgcgctgcctgttgccaaatattgttctgcacatgcgattaagagatcagtcactttcgtatcctcggcatagcgttttcccggagctgaaacgactacagctttccgtgccggatctgaggtaacgatgtgaaacaccttgtcaagctgggcgcctgaagcaagtgagctgcctccgaatttaacgaccttcatgtttacatctcctaatgtttaaaattttcacacaaatttagtatttattatctctctttcagtactgtaaatcaaggggggatttctttctcaggagaacatttgtatttttcacgaggaataatgttaggtttgctgaccgtatgcctgcgttataaagataaatatggtaaacagcctaacgttttgggatggaaaatggttagaatgattagtaaaattgataaatgactaggttaatatttttaaagaatattgactaaccctataaaaatggtaatatgtaaatgataatgataatcaattactatatggccatattgttttgagtccttgcggagtaggagatacgttctttttgctgtaaggatgtaaggaggcagcatgaagctacgttacttatttattctacttatcatattagcagtcacatctgtatttatcggtgtagaagatctgtcgccgcttgatctcttcgatttaagcaaacaagaggcgtcaacgctgtttgcaagccgtttgccgcgattgatcagcattgtcattgcgggattaagcatgagcatctgcggtttgattatgcagcagatcagcagaaataaattcgtgtcaccgacgacggcgggcacgatggattgggcgaggctcggcattttaatttccttgctgctgtttacatccgccagtcctttaatcaaaatgctggtcgcgtttgtctttgcccttgcaggaaattttctgtttatgaaaatccttgaaagaatcaagtttaacgacaccatctttattccgcttgtcggtttaatgctcgggaatatcgtcagttcaatcgcgacatttatcgcatataaatatgacttgatccagaatgtgtcatcatggctgcagggagacttctctttagtcgtgaaaggaagatacgagcttctttatctgagtattccgctcgtcatcattgcctatgtgtatgcggataaattcacattggccggtatgggtgaaagcttttctgtcaacctcggcctcaagtataaacgggttgtgaacatcgggctcattatcgtgtccctgatcacgtctcttgtcattttgactgtcggtatgctgccgtttctcggtttaatcatcccgaatattgtatcgatttacagaggagacaatctgaagagcagcctgccgcatactgcgctgttgggagcagtttttgtgctgttttgcgatatactgggcagaatcattatcttcccttatgaaatctcgattggcctgatggtcggaatcatcggcagcggcattttcctgtttatgctgttaaggagaaaagcctatgcgtaaccagatgaaaatagctttgctcgttggtttagccattgtatgtattggcttgtttttgttttatgacttaggcaattgggattacaccctgccgagacgaatcaaaaaagtcgctgccattgtgctgactgggggagcgattgcgttttcgaccatgatctttcaaacgattacgaacaaccgcatcctgacgccgagcattttgggccttgattctctctacatgctgattcagactggcattatctttttgttcggttctgcgaatatggtcatcatgaataaaaacatcaactttatcatctctgttctgctgatgatactgttttctcttgttttgtatcagatcatgttcaagggtgaggggagaaatatctttttccttctgcttatcggaatcgtgtttggcacgctgttcagcagcctgtcttcttttatgcagatgctgattgatccgaacgagttccaagttgtgcaggacaagatgtttgccagctttaacaatatcaatacggatttgttatggctcgcgttcatcatcttcctgctgacaggcgtttatgtctggcgttttacaaaatttttcgatgtgctgtcgctcggacgcgagcacgccgtgaatttgggcattgactacgacaaagtggtgaagcagatgctgatcgtggttgcgattttggtttctgtttcaacagcgctagtcgggccgattatgtttttaggccttctggtcgtcaacctggcgagagaattcctgaaaacatataagcattcatacttaatcgcaggctccgttttcatcagcatcattgcgctggtcggagggcagtttgtggttgagaaagtgtttaccttctcaacgacgctgagcgtcattattaattttgccggcgggatttattttatctacttgctgttaaaggagaataaatcatggtagaggtcagaaatgtaagcaaacaatatggcgggaaagttgttcttgaagagacgtcagtcacgattcaaaagggcaaaatcacctcgtttatcggtcctaacggcgccggcaaaagtacgctgctgtctatcatgagccgcctgatcaaaaaggattccggcgagatttacatagacggacaagagattggagcatgtgacagcaaagagcttgccaagaaaatgagcattttgaagcaggcgaaccaaatcaatatcaggctcacgatcaaagacctcgtcagttttggcaggtttccgtactcacagggccggctgacagaggaagactgggttcatatcaaccaggcgcttagctatatgaagctggaagacattcaagacaaatacttggatcagctgagcggcggacagtgccaaagggcatttatcgccatggtcattgcccaggacacagattatatctttctggatgaaccgctgaacaatctggatatgaaacactcagttgaaattatgaaactgctgaaacggctggtagaggagcttggaaaaacgatcgtgatcgtcattcacgatatcaattttgcttcagtctattctgactatatcgtcgctttgaaaaacggccgaatcgttaaagaaggaccgcctgaagaaatgatagaaacatcagtgcttgaggaaatctacgatatgaccatcccgattcagacgattgataatcaaagaataggtgtttatttttcttaatatatagaagaggtgaggagcatgaaaaagttcgcgttactattcatcgctttggtcactgccgttgtcatttctgcatgcggaaaccaaagcacaagcagcaaaggttctgatacaaagaaagaacaaatcacagtgaaacaccagctcgacaaaaacggcacaaaagtaccgaagaaccctaaaaaagttgtcgtatttgactttggaagcttagatacattagataaactaggacttgatgatatagtagcgggcctgccgaaacaagtccttcctaaatatctgtccaaattcaaggatgacaaatacgctgatgtcggcagcttaaaagagccagacttcgacaaagtggcagaattagatcctgatctgatcattatttcagcaagacaatctgagtcttacaaagaattctctaaaattgcgccgacgatttaccttggtgtagatacagcgaagtacatggaatcatttaaatcagacgctgaaacaatcggtaaaatctttgataaagaagacaaagtgaaagatgagctcgcaaacattgatcactcaatcgcagatgtaaagaaaaccgctgaaaagcttaacaaaaacggtctcgtcatcatggcgaacgatggaaaaatcagcgcgttcggccctaaatcaagatacggcctgatccatgacgtgttcggcgtgacaccggctgataaaaacatcaaagcgtctactcacggacaaagcgtttcttacgagtacatttcaaaaacaaacccggattacctgtttgtcattgaccgcggtacagcgatcggtgaaacatcatctactaaacaagtcgttgaaaatgattatgtgaagaatgtaaacgcagtgaaaaatgatcatgtcgtctaccttgattctgctacttggtacttatcaggaggcggtcttgagtctatggcacaaatgatcaaagaagtgaaagacggtttagaaaagtaaaaccaaaaagagcctccgctaaatagcggggctctttttttgttaatcagcgtgccggctgctgttcggcagggcgctgaggtttctttaatgtgaatgagagaaggaagccgacaagtgcaatgacggcagccactataaaagcggcgttcatgccgtgcagggcggcgtgcttcacatttgtcgtgcctgcatgtgccgcctggttgctcatcacggaaaccaatagtgcggttccgatcgagccgccgacttggcgaatcgtgttgttcatcgcagttccgtgcggaatcaagtggcgcggcagcgcattgattccggctgttgtcaccggcatcatgatcatggcggtgcctaagagacgaacggtgtataaaacgacaatccaagcgagtgacgtatggtcagtcagctgcataaacggcagagatgtcaggaagatgatgcagaaaccggcaatcgccagccctcttccgccgacacggtcaaaaattctgccgataatcggcgacataaagcccatcacaacggctcccggaaggagcataagccctgtatcaaaagctgtgacgtctctgacattttgtgtataaagcggcaggatggtttccgtaccgatcaataatgcaaagacgagggttcccagcagtgttgttaaactgaaaatgccaaacgtgaagacgcggaattccagcatcggtttttcaagcttcatttgtcttgtgataaacaagagcagcgcgatgacacccaccagcagtgaaatcaagacggttgaactggaccagccgtaagagccgacgcttgagaagccgtacagaaggccgccgaacccaaatgttgaaaggatgactgataaaatatcaatctgtgtttttcttaaagtcgtcacgtttttcatcaggatgctggcaagaatcaaatcaatcacagcaaacggaagaataatataaaacaatgatctccaagagaaagcttcgacagcccatccggaaagagtcggtccgatcgcaggcgcgaatgagatgaccaatccgaccatacccatagcctggccgcgtttttcaatcggaaagattgtcaggaatacagtctgcatgagcggcatcataatgccggctccggccgcttgaatgatacgcgctgtcagcagaaccgggaagttcggcgcgaacgctccgacgactgttccggcagtgaaaatgctcattgctgtgatgagcagcgcccggcttgtgaatttctcaattaaaaacgcggtaatcggaattaaaatcccgttggttaacataaatgatgtggtcagccattgtgcttggttggcatcgacattgaaatccctcatgatatggggaagtgcggtaatcaacaatgtctggttcaaaatcgccacaaacgctccggctaacaaaatgccgacaatgacagaacggttaaaaggtttttgttcaatacttgtgttcaatacatatcccttcttttctctaagtaattaacagtgtttttaacatggaaacgggctgtgttaaaacactggtttgttccagatagccaatcagtgatttgagtaaaaaagcgcggggttcttccttcttcgcttcttcctccagcatggcggctgcggatgtcagttcatctacgtcatagtccgcggcggacagggaagagatgcctttatgtaattccttcaggctttccgataataggactgatttatcctttggcttgtaggaggatgctgaatgaatataaagctcgatggcttcgggcggaagaagagactggcgggtttccctgtttttgataatctgattgagggtgctgatgataaactctgcgatcgggtcaagctcaagcggtttttcctcgattttgatcagcattaaaaactcacgcatcatgccgtgaagaatgataaccaaatcccacacaaacgggagaatggtttctccatacgcctggatcagcgaatcgcggtgccagcagataatcgtcgatctggtctgatggatatgctgtttgacccggtcattatgcagcttggggtttccgtaggtcagcatattgaaaaactgctgattccgcctgaagccctccagttccattttgaccttttgcgtcaaacgctcctccggtgtaagtgcggtattttcctgaagtcttgaggctgcggccaccatttgcttctggttaaatgacagcagctccaaaagcagatcttctttagattggaacagcttatatatcgaagcttttgacatcttacattcttctgcgatcgcctgcatggaaaccgacgtaaaatccttttccgaaaaaagctttcgcgcggctaacaagatatctgtttttttatcaagcatctcatggcttccttctttcttgaacattagaaaacccattggttcacagaaaaccaatgagtaactatgaaaaaattttaccaaataaacaaaatagaagtcaatggattttaaccgggtaaatgaaaggcctgccggaaaatccgacaggccgaataagagcttatttttcaactttaaatccttgtttttcaagcatttcacggatgtgcggatagtacaggcgctcatagtaggaagcgatgctctgtgaccaatttcttgtttcttttccgtttgtccgtttattcatgtattcagacatctgttcgtcgtatgcctgaatgtgagacgtcagctcatcctgattcaaataagtttcctgatgattgacagcttcctgcggcaagcgcggttttttcgctgaacggtcggcaggatgcccaatgacaaggccggataaagggaacacgtattttggaagctcaagcagttcgatcagctcttgagggtttccgcgaaccgcaccgatcggaactgtgccaagtccgagtgactcagccgctgctgttgctgtgccgagggcaataccagcgtctactgcgccgacaagaacagattccaatccatttgtgatttccattttgaaatcatgcagatcttcaagcgcaattttggcccgattgaaatctgcgcagaacagcaggaaaacaggagcttgatcgatccatggctggccgcctgccagctcggagattttctttttgcgctctttatcctggactgtgatcacagtcacctgctgtccgttgatagaagaaggggctgattgcaccgcttcaatgatttggtccaattgctcctgagctacaggctcatctgtgtagctgcgaatcgagcggtggtcttttaaagatttaatcacttcattcatatgggacaccctttctttactcgctaagctctgtgcggacaacatcaagaggggcgctcagcagttcttttccttttgcgacaaacccttggaaatgcgcagtttcgttatggaatttcattgccgcttcatctttccatttttcaagcatgacaaatgtattttcttcgcctactttttcgaataggtcgtattgcgcgttgccttcctcagctcttgaatgctgaacaagtgattgagcctcgctcaaaaattcctcgcgtttttctggttttactttgatgtaagcttgtaatacgatcatttaaatctcctccgttgttatgcgaatttattgttcgaatttcatcgaactaaatgtaacatgtattctaaatgaggtaaaggaaaaacccttatatagtaaaattgtcattctaattgttgtgtgatacatttgtgtcatgaacattccaaaccatccagaaacagaaacattgcagctgacaaaggttcttcatgcacttagtgatccgcttcgtttagagctcgtcaagcaattagctgaagcaaaagaaaaaacgtgcagcacctgtgcagatgtgcaggttgccaaatcgactttgtcgcatcattttaaagttttgagagaatcgggcatcgctcaagttcggatagaaggaaagcgccggtattattcgcttcgcgctgaagaccttgaaaaggcatttccgggcctgcttgaagccgtgctgaatgtagaccaggaccgctggtgaatcaatcccctgtaacggggatttttttatgtccgtaaaccgctttgaaaagccgctgcacacccgcctgaatatcttcttccttcagccgtgcaaagccgataatgagagcaggcctgcccgtttgccgcttgttttccttcaagttaaatcggctcattccgaatatttcaagctgcagcccggcagcatgtgacaggatgtcttgttcggtgcgcctggtatcaaattcggtaacaaaatgcagccccgcatttgccccttttacggtaacctctccgctgaactctgcttctaaagcggtgatcaggcgttctctcttttctttataatgctgcttcattttttttatatgcttctgatattcaccagactcgataaattcctgcagggtgagctgtgtgagtgatgagcaagtctgcagatcatagccccgctgtttgtatgccctcaacagctcaggcggcaacaccatatagctgatccgcaagccggggagaagggactttgaaaaggttcccatatagatgacattttgaaaacggtcgaggctttgcagcgccggaatactgtctacatcatatgtgaattcactatcataatcgtcctcaatgatatatcggcgcggctcctcggctgcccagttcagcagctgaattcttctggatacaggcataatcgttccggacggaaactgatgcgacggggtggtcaccagcacatctggctgctgtctggtgatttcagcaatcgacatgcctttttcatccagcatgatcgtctttacttgttttccggcattcttcaaaagctgatacatgcgcctgtagccaggctcctccatcgcatacacggcttccttgggtaaaagctcagtcaacagctgcatgagcacctgtgtgcctgcccctatgatcatttgttccggcctgcattttacacccctcgtcagggaaatgagcctcgtaatggccgctctcacttcatatatcccttgcggatgtgacatatcgccgagcgtgcggtatgagcgggaggccgctttttgctcgcagcggaaccagcttttgatcggaaaatggtctgtatcggaactcatgtgtgaaaacgatatccaatcgctctggtcgatgtgaatctcttttaggtcatccggcagtgcaaatggagggtgctcctcggcggaaaacatgtctagttcctccacgaagaaaccctttcgttcaatggcgtacaaatacccctcagccagcagctgctgataggctgaattcactgaatttacgctgaccttgagattttcagccagctcccgcttggagggaaccttcgagtgcggcagcagattgcggctgaggatttcttttttcagcttttgataaatttgctgatagatataatcggcttgttctgaacgatcgagtgtaatcgtgatatccatttgtattttctccttctgataccatcaaaaagttataattggtacttttcatcataccaaagagaagtcagaatgataagaaaataccgacagggggatattcacatgagtcaaacaacagcaagcatcacaactgcacaatggcagcaaaaacgggatcaatttgtgtcaaaaggtgtgagcaacggcaaccgcagtctggcggtcaaaggagaaggggccgagctgtacgatctggacggccggagatttattgattttgcaggcgccatcggcacgttaaatgtcggacactcgcatccgaaggtggttgaggctgtgaagcggcagacagaggagctgattcatcctggctttaatgtcatgatgtacccgacttatatcgagttagccgaaaaactgtgtggcattgcaccgggcagccatgagaaaaaagcgatttttcttaactcaggggcagaagcggtcgaaaacgctgtgaaaatcgccagaaagtatacaaagcgccaaggcgttgtctcgtttacacgcgggtttcacgggcgcacgaatatgacgatgagcatgacaagcaaggtaaaaccttataaattcggtttcgggccttttgcgccagaggtttatcaagcgccgttcccttattattatcagaagccggccggcatgagtgatgaaagctatgacgatatggtcattcaagcattcaatgatttctttatcgcttcagtggcgcctgaaacggtggcgtgtgtcgtgatggagccagtgcagggagaaggcgggtttattattccttcgaaacggttcgtacagcacgtcgcttcattctgcaaagaacacggcattgtttttgttgctgatgaaatccaaaccggctttgccagaactggcacttatttcgcaattgagcactttgatgtagtgcccgatctgatcacggtttctaaatcgcttgcggcaggcctgccattaagcggcgtgatcgggcgttcggaaatgcttgatgcggcagcgccaggggagctgggcggcacgtatgccggcagcccgctcggctgcgcggcggctttggcagtcttggatattatcgaagaagaaggactgaatgagcgatctgaagaaattggcaaaatcattgaagatagggcgtatgagtggaaaaaagaattcccgttcatcggtgacatccgcagactcggggcgatggccgcaatcgaaatcgtcaaggatccagacacgcgtgagcctgataaagcaaaagcagcagcgatcgcggcctatgcgaatcaaaacggattacttttgctgacagcgggaattaacggtaatatcatccgctttttgacaccgctcgtcatctcagacagccttttaaatgaagggctcagcatcttggaggcgggcctgcgagcttaatcattggaaagaaaacggctgggtctgctatcattttaagtaatcatgaaaagaaaggaatgttcaatatgccagatcaattaacggtctacaacccggctacgggcgaggagatcaaaacgattcctcagcaatcagccacagaggtagaagaagccattgaacgttcacatcaagcgtttaaaacgtggtctaaaacatcagcgaacgaaagagcgtctcttttgaaaaaatggtatgagctgattgttgaacataaagaagagcttgcagatttaattacaaaggaaaacggaaaaccataccaggaagcagtcggcgaggtactttacggcgcaggctatatcgaatggttcgcagaggaagcgaagcgtgtgtacggaagaacggtcccggccccgacaacgggtaaacgaattgttgtcacacgccagccggtcggccccgttgctgctatcacgccctggaatttcccgaatgcgatgattacacgcaaagcggcgcctgctcttgccgctggctgtacatttatcatcaagccggcgccggacacaccgctgtctgcttatgaactagcgcgcctcgcatatgaagcgggcattccgaaggatgttcttcaggttgtaatcggcgatggagaagaaatcggaaatgtgttcacaagcagtccgaaaatccgcaaaatcacgttcacaggctcaacacctgtagggaaaatccttatgaaaaacagcgcggacaccgtgaagcacgtctcaatggaactcggcggacacgccccgctgatcgtagatgaagatgcagacattgaccttgccgttgaacaggcgatggcgtccaaataccgaaacgccggccaaacctgcgtatgtgccaaccgcctgatcgttcatgaatccattaaagatgaatttgctgcgaaactgagcgagcaagtgtctaagctgaaagtcggaaatggacttgaggaaggcatcaatgtcggcccgatcatcaacaaacgaggcttcgaaaaaatcgtcagccaaatagatgatgcggttgaaaaaggcgcgaaggttattgctgggggcacatatgaccgaaacgatgacaaagggtgctactttgtgaatccgacagtgctcaccgatgtcgatacgtccatgaacatcatgcatgaggaaacattcggcccggtcgccccgatcgtcacgttttctgatattgatgaagcgattcagcttgccaacgatacaccgtatggcttggctgcttacttcttcacagaaaactaccgccgcggcatctatatttccgagaatttagagtatggcattatcggctggaatgacggcggaccgtcagcggttcaagcgccattcggcggaatgaaagaaagcggcatcggccgtgaaggcggttcggaaggtatcgagccgtaccttgaaacaaaatatttgtctatcggtttataaaagaatgcacgctcctgagagctgccggattttccggcagctctttttgtgttccggcgaataatcacaacaattccagccaaaataacagcaaatacattttgaaagaaggttccccaacaatggatttattattggctcttctcccggctttgttttgggggagcattgttctcttcaatgtgaaattaggcggcgggccgtacagccagacactgggaacgacgatcggggcactcattgtttctatcgttatttacttttttgttcagcccgttctgtcccttcgcatttttattgttggaatcgtatccggcttattttggtcacttggacaggccaaccagctgaaaagcattcaattgatgggcgtgtcgaaaacaatgccgatttccacaggaatgcagctcgtttccacctcgctgttcggtgtgatcgtgttccgcgaatggtcaacaccgattgcgattacgcttggcgttctcgctttgatctttatcattgtgggaatcattctcacgtccttggaagataagaatgataaaaaagagggcgagccaagcaatttgaaaaagggcattttgattctccttgtttcgactcttggttatttggtttatgtagtcgtggctagattattcaatgtgtccggctggtccgcgctgctgccacaggcaattggcatggtggtcggggggttagttttaacctatagacacaaaccctttaacaagtatgcgatcagaaatattctcccagggttaatctgggcaggcggaaatatgtttttgtttatttctcagccgcgagtcggcgttgcaacgagcttttccctttcacaaatgggaattgtcatttctacgctcggcggtattttcatcctgcgtgaaaagaaaacgaaacgccagctaatagcaattgcgatcgggattatcctgataattgccgccgccgtattcttaggaatcgccaaaacaaattcataacaaatggaggaggatgtatatgtatccggatttaaaaggaaaagtcgtcgctattacaggagctgcttcagggctcggaaaggcaatggccattcgcttcggcaaggagcaggcaaaagtggttatcaactattatagtaataaacaagatccaaacgaggtaaaagaagaggtcatcaaggcgggcggtgaagctgttgtcgtccaaggagatgtcacgaaagaggaagatgtaaaaaatatcgtgcaaacggcaatcaaggagttcggcacactcgatattatgattaataatgccggtcttgaaaatcctgtaccatctcacgaaatgccgcttaaggattgggataaagtcatcggcacgaacttaacgggtgcctttttaggaagccgtgaagcgattaaatatttcgtagaaaacgatatcaagggaaatgtcattaacatgtccagtgtgcacgaagtgattccttggccgttatttgtccactatgcggcaagtaaaggcgggataaagctgatgacagaaacattagcgttggaatacgcgccgaagggcattcgcgtcaataatattgggccaggtgcgatcaacacgccaatcaatgctgaaaaattcgctgaccctaaacagaaagctgatgtagaaagcatgattccaatgggctatatcggcgaaccggaggagatcgctgcagtagcagcctggcttgcttcgaaggaagccagctacgtcacaggcatcacgttatttgcggacggcggtatgacacaatatccttcattccaggcaggacgcggttaaacaaaaaaagcgacccagacatcacatctggatcgcttttttattacgcacgctttttcttaacaagtgctgctacagataaaataatggcagccgcagacagcacaatcgctgtaatgtctagagctgaagaacctgagttttcggaatcgtcttttgttttcgtggcgctgtgctcatctgtcacttgttttgcagacgtgatgtttgtaatggaatgaggtgtatcggcatcctcgtcacctgtccactcaacaatgctgccgtctttgtaatattggtatgcgtcccaagcagcttcctccgctttgtcagggtttttggcaacaaaggtaaactgctggaactgtccttcctgaatgcctccgtcagtcgcctcccatgtcacggacactgatttgtcatcatgtttttgagtggagaccttccagcccggaattggctcatattgctggaattcaacatccttcggcattttgaggactaccttcgttgtcggcagatttttctctgaaggaaccttcattgtatacgtttcccaagagcctgcagcagactcagccggttttacagaaacatgcgcgctggcaggggccgtaaagaataagagggagccgacaatagccggacatagtgtcaatgcgatttttttcaacaacgtaaacactccttaattggtctttgtaaacatgatattgatttcgttaaagtcgccggtcaggccgtggactttgatcttccagtttcctttttcattaatcgacaggttttgatcctggaagacgccttttgttttttcttttaatgtaaaagtgcttttgttttcgctgcctgacaggcctgttttataaacggttaacgtgatttgctggatgtttttcacgggatctccgttatggtcggtgacccgcagctcaaaaacattttttccgggctggtttgggctgatgctgagagaaacgctttgtccgttctcaatcgctttggtttggtagaacggttccggcgccggctcaggcgggcttggcaggcttgtaaacacggccgctgtgatcaatacagcgatgccgattgcccactccgctttcaacgttcggctgattcctgtgcggcgctgctttctggtaagcagaaaatgaatcgtgcctaagaccagcatgaaaacaaacagcccgcttttcactaaaagagcttgtccgtacgctgtatggaacagtgaatccattgaacgaatgatgaaaaatccattgagcaagcctgaaaacaaaatgacgccgactgcagtgagcgcccatggggagaaccgtctgaccgtctcccacgcgagcgttttgtcaggctgcctccattcttttgagagcagcaaaacgagtgccgctattccgccgacccagatggaagcggaagttaaatgaaggaaatccatcaaaatgccgaccgttttttcttcaacgacagcagcatgcccggtaaacgccttggcaagcaggagaccgaaaaagaaaatgagcggcgctgtccaatagccaaaggatgaaaagcggtttttccgtatcgcagggatgacagacagtgcgagcagcacgaacagcgcagcctgtatgatccaaatggagccgcctgctgtctcaaacagtgtttctctgatgtagcccgcctggaatgcgctgccccagccgccgcctgcgttcgcttttgtctgaatcggaagctgaagcaaaagcgccagacccagtgctgcgatcgagccggtcaggatacgtctcgtccgtttgacgagctgttctgatttccctttataccagaaaagatggaagaaaaccgttccgataaacagagataaggctgtatacagaatcgcgcgatctgctgctgttcccggattcagcgctgaatcggctgctttttggctgctgaatccgccatccgctttcccgatactgaacggaatgacgccggaaacaggatgtccatccgcggatacggcattccattccgctctgtacacatctttaggcagattcttcttcagcttcactgtcatgatgtgatgattatcttttttgatttcagtcttgtccgtatccacacggtcgccgtttgaattatagactttaatgtaatgaaacccttcttcaaccggttcattaaattcgatttccacctgcgcaggggcgctttttaattcgctgttttccccaggtgaagatttgacaatataggcgtgagcaaagcttgttttcggcaggaaaacaagaaaaagcagaaggatgatccaccatctgtttcgcttcatcactcagacaccaccttccgctgtatgtgttgtgttatttcttggtgcaggtgcagcgtttctttcggtcttgaagcatatcttccagcgcttggtcgaaagtgcggacggctccgccgaatcctttttgaaatcgttcggcatggtcaagtgtcgcaaacggaatggcctgcggctggcagcagtgcaggtttaattcagcatttacgacgaaataagccgaaccggcactgacggttgtctgtaacagaaaatctctgcaaatcaagtgtgaaacctcttccgttttatccgcgtaacgcaaaaacgcgcaatgtgcgcagcatagctgttcaatgtcttggtttaccgtaatcagctgaaccgaatgagcttgattgacgggcttcaagcaatagctgcacatatgatccgtttgaggtgttcgggcggggagcgtgatgccgccggccgttttaatgacctgatttgactgaaccagctgattgacatctctgtataccgtcatttccgaaacgccaaaccttgcgctgatgtcagaaattctgagcgcgccttcttctttcagccacttcagtatgtgttgctgtctattaatcggaagcattcatacaccctcttcattaagatctatttaagcgtagaggattttagagacagagacaagtaagctgatgataaaaaatgtgaaaatgtgttgaacaacaacaaaacgaaacagaagggactctggtataatagacatatggaatagaaagtgaggaataccctatgaaagaaacaccatgcccgaactgcggcaaacctttgacaggcgacatggtcagatcatcaaatgtgccttgtcaatttcgctgcggacactgccgggaacggctttatgaatataaagtatcagctccgattatgctggtatcattagcggccatcgtgctgctcatttatcttttgctgctcctccgcaatgcggcaggttcaatgctgccggctgtacagcacgtgccgatggctgtttttgcgcttgtgtgcgcctatcccgtttttattgtgagtgagcgaatgatcgcaaagtacgtgattcaaaatggcaacatcatttatagaggaaagagaaaaggctcctgatatcaggagcctttttatttttaaaaaattgtcacagtcatgtgccaaagtcctctttactttcaattgtatagggactgtaagcgttttaacatagagtcaaagggaagcatcattctctgaacatatttttttatcttacagcgacaaacaaaacagggagggtttatatatgcagcagcaagaacagcagcaaggcggcatgaaagtgaaagtgcaacgctttgggagttatttgagcggaatgatcatgccgaatatcggcgcgtttatcgcgtggggtatcattaccgcgctgtttattccggcaggatggtttccgaatgaacagctgaacacgctggtcagcccgatgattacgtatttattgccgcttttgatagcgtatacaggcggaaaaatgatctacgaccaccgcggcggagttgtcggagcgacagcggcaattggggtgattgtcggatcggatattccaatgtttttaggcgcaatgattatgggtccgcttggcggatacctcattaaacagactgataaattattcaaggataaagtcaaacaaggctttgaaatgctgatcaacaactttacggcagggattgtcggcgcggctttaacgattctcgcgttttacgccatcggcccggttgtcctgacgctaaataaattgctggcggctggtgtggaagtcattgtacacgctaatttactgccgatagccagtgtttttgtagaaccggcgaaagtgttgttcctcaacaacgccattaaccacggaatcttaagcccgatcggaatcgagcaagcatcccaaacaggaaaatcaattctgtttttagtagaagcaaaccctggaccggggctcggcattttgctggcgtacatgttctttggcaaaggatcttcaaaatcaacggctcccggtgcggcgatcatccatttcttcggagggattcacgagatttacttcccgtacattctgatgaaaccggccctgattctcgcagccattgccggcggagcaagcggactcttaacgtttacgatctttaatgccggacttgtcgcggcagcgtcaccgggaagcattatcgcattgatggcaatgacgccaagaggaggctatttcggggtattggcgggtgtattggtcgctgcagctgtatcgttcatcgtttcagcagtgatcctgaaatcctcaaaagctagtgaagaagacttggctgccgcaacagaaaaaatgcagtccatgaaggggaagaaaagccaagcagcagctgctttagaggcggaacaagccaaagcagaagaagcgtctgagctgtctcctgaaagcgtgaacaaaattatctttgcgtgtgatgcgggaatgggatcaagtgccatgggggcatccatcttaagaaacaaagtgaaaaaagcggagcttgacatcagtgtgaccaacacggccattaacaatctgccaagcgatgcggatattgtcatcacccacaaagatttaacagaccgcgcgaaagcaaagctgccgaacgcgacgcacatatcagtggataacttcttaaacagcccgaaatacgacgagctgattgaaaagctgaaaaagtaatcttatagaaagagagtgatactcatgcaagtactcgcaaaggaaaatattaaactcaatcaaacggtatcatcaaaagaagaggccatcaaattggcaggccagacgctgattgacaacggctacgtgacagaggattacattagcaaaatgtttgaacgtgaagaaacgtcttctacgtttatggggaatttcattgccattccacacggcacagaagaagcgaaaagcgaggtgcttcactctggaatttcaatcatacaaattccagagggcgttgagtacggagaaggaaacacggcaaaagtggtattcggcattgcgggtaaaaataatgagcatttagacattttgtctaatatcgccattatctgctcagaagaagaaaatattgaacgcctgatctccgctaaaagcgaagaagatttgatcgccattttcaacgaggtgaactgacatgatcgccttacatttcggtgcggggaatattgggagagggtttatcggcgcgctgcttcaccactccggctatgatgtggtgtttgcggatgtaaacgacacgatggtcagcctcctcaacgaaaaaaaagaatacacagtagaactggcagaagagggacattcatcagaggtcattggcccggtcagcgcgattaacagcggcagtcagcccgaagagctgtaccggctgatgaatgaggcggcgctcatcacaacagctgtcggcccgaatgtgctgaagctgattgctccatctatcgcagaaggtttaagacggagaaacactgcaaacacactgaatatcattgcctgcgaaaatatgattggcggcagcagcttcttaaagaaagagatatacagccatttaacggaagcagagcagaaatccgtcagtgaaacggtaggttttccgaattctgccgttgaccggatcgtcccgattcagcatcatgaagacccgctgaaagtatcggttgaaccatttttcgaatgggtcattgatgaatcaggctttaaagggaaaacaccagtcataaacggcgcactgtttgttgatgatttaacgccgtacatcgaacggaagctgtttacggtcaataccggacacgcggtcacagcgtatgtcggctatcagcgcggactcaaaacggtcaaagaagcaattgatcatccggaaatccgccgtgttgttcattcggcgctgcttgaaactggtgactatctcgtcaaatcgtatggctttaagcaaactgaacacgaacaatatatcaaaaaaatcatcggccgctttgaaaatcctttcatttcggacgatgtgacccgcgtagcgaggtcacctctcagaaaactgggagaaaatgataggcttgtaggcccggcaaagaaaataaaagagccgaatgcactggcggaaggaattgccgcagccctgcgcttcgatttcaccggtgaccctgaagcggttgaactgcaagcgctgattgaagaaaaaggatacagcggcgtacttcaagaggtgtgcggtattcagtcccatgaaccgttgcacgccatcattttaaagaaacttaatcaataaccgatcacccgtgacacaatgtcacgggctttttttactatctcgctatctagtataatagaaagcgcttacgaaaacagggggaggagaatgacgatgaaacaattcgagattgcggcaataccgggagacggagtaggaaaagaggttgtagcggctgctgagaaagtgcttcatacagcggctgaggtacacggaggtttgtcattctcattcacggcttttccatggagctgtgattattacttggagcacggcaaaatgatgcccgaagatggaatacatacgcttactcaatttgaagcggtttttttgggagccgtcggaaatccgaagctggttcccgatcatatatcgttatggggcctgctattgaaaatccggagggagcttgagctttccattaatatgagaccagccaaacaaatggcgggcattacgtcaccgcttctgcatccaaatgattttgacctcgtggtgattcgcgaaaacagtgaaggcgagtatagtgaagtcggcgggcgcattcacagaggcgatgatgaaatcgccatccagaatgccgtgtttacgagaaaagcgacagaacgtgtcatgcgctttgccttcgaattggcgaaaaaacggcgcagccatgtgacaagcgccacaaagtctaacggcatttatcacgcgatgccgttttgggatgaagtctttcagcagacagccgctgattatagcggaatcgaaacatcatctcagcatattgatgcgctggccgctttttttgtgacgcgtccggaaacgtttgatgtcattgtggcgagcaacttgttcggtgatattttaaccgacatcagctcaagcctgatgggaagcatcggcattgcgccttctgcgaacatcaatccatccggcaaatatccgtccatgtttgaaccggttcacggctcagctcctgacattgccggacagggccttgccaatccgatcggccagatttggacagcgaagctgatgctcgaccacttcggagaggaagaattgggggcgaaaattcttgatgtaatggagcaagtgactgccgacggcatcaaaacacgcgacattgggggacaaagcacaacggctgaggtcactgatgaaatctgttcgcgcttaagaaagctctgatgaatcaggccggtggcagatggctgccccggcctgtccatttccttacgaaaatttccacgaaagtctaaccaagcagatccaaatgctgtataataatttggaattcttaggaaagcatcgggtgaaggaagttgaatgcaaaaacaatcacgttaaagaaaaaaagaaaaatcaaaacgatcgttgtactcagtatcattatgatcgcagctctcatttttacgattagattggtgttttacaagccttttcttattgaaggatcatcaatggccccaacgcttaaagactcagaaagaattctggttgataaagcagtcaaatggactggcgggtttcacagaggagacatcatagtcattcatgacaaaaagagcggccgctcatttgtcaaacgtttaatcggtttgcctggtgacagcattaaaatgaaaaatgatcagctatacataaatgataaaaaggtggaagaaccatacttaaaggaatataaacaggaggtcaaagagtcgggtgtaaccttaacgggtgacttcgaagttgaggttccttccggtaaatattttgtgatgggagataaccgtctcaattcactggatagcagaaacggattgggcatgccttctgaagacgatattatcggtactgaatctctcgtcttttatccattcggtgagatgagacaggcaaaataaaatgcaatgcaaaaagaacatggaacatgacggcaccgataataaagcgccgtgcacgtttaaaaaaatgatgatgaaacggtgcggagccggctttccgccccgttttttatgatagaaagcgttttgaagaaaagggccctgttgaaataaacagaatcaggattggcgaagccgtgaagcgcatcgaattggtaaatctcaagatgggtatgctgtttttcccgcagttttttgataagaagcgctacgtcaaacgacggctcataattagggaaaaacaataggaccgggcaggctggcacgtgatgaagagagtcgcgtatccgggaaccgtaataacaaaccgatccgctcacctcaggcatactgctgcatttccatgcgatagtagcccccacgctgaatccaatcacaaagatgtgccgtccggcgttttgcctgatcacattctggatgatggtttctcccgttttcagccgttcgtgttttgtaaattgttcgtatgccgttttttcttcttgcagtgtgtagacttcattctcgccgagcaggttgggcgtcaacacatcatatccagccattttgatcagccggcccatctttttcatatggctgtttacaccgtatatttcgtgtacgagaatgacaagcggttttggggacataacggcctccttttgtgttttttccattatatcctatcgtttcactttaggctgagatataatggtcaaaaaaggagatataaaatgaactcattatctttgcctcaccgctatccatttttgtttattgatggcgtgacggatagcgagcccggcaaacatgcggcagcttataagctgattagtgagaacgactggtttatcactgatacgcaaacagaaatgccgttttcacttgtgattgaagcgcttgcgcaaaccgcggcttttacaggaattacagatgagaacagcttgggattattgtcttcggtgaagaaagcggaaaagctgggagaagctgtgcctggtgaccggcttgatcttacgtttgaagtcacgcgcaatcggcgcgggtttgtgttcggacatgccaaggcgtcagttggagagcagcctgttgctgaagctgaaatcggcatctatattgaaaaatgaaaaaaacccttcacaacattttgtgaggggttctattttgtgtcgtaatcccgttcgctttgagagttatctctttgctggcgtttgtgtttttcatcattcatattttccttcagctcttcattaggaatcggatcggttaagtcgttgtgctcggggttttcatttggtttgttttgctgttttttttctgtcatgtttgatcacctcaccgtttgttttcctcttatccgttctcctcaaacataggaaaccgcttttttgtcccgctgggtataatgtattagaatagagagaagcacaacaaaaagataaagagaggtacatatatgtctgttcaaagagaagatgtagatatcaagctgatcgcaattgatatggatggtacactgctgaacgacgagcagctgatctcggatgaaaaccgcaaagccattcgtgaagcggaggataaaggtgtgtatgtggtgatcagcacgggccggacgcttatgacgtgccgggaactggcggaatcgctaaagctgtcatcctttctaatcacggcaaacggcagtgaaatttgggattcgaattttaatttggtggaacggaagctgcttcatacggaccatattcaaatgatgtgggatttgcggaataagcacaacactaatttctgggcttctacggtgaataaagtatggagaggcgagtttccggaaaacattacggatcatgaatggctcaaattcggctttgacatcgaggatgacgatatccgaaacgaagtgcttgaggagctgagaaaaaacaaagagctcgaaatcacaaattcaagtccgacaaacattgaagtcaacgcgcttggcatcaacaaagctgcagcccttgccaaggttacggaaaaactcggctttacaatggagaatgtgatggcgatgggcgacagccttaatgacattgcgatgatcaaagaagcgggtcttggcgtcgcaatgggcaatgcgcaagacatcgtaaaagaaacggctgattatatcacggatacaaatattgaggatggtgtcgctaaagcgattcgccattgggtactataaaaaaagagagtcctaagatggactctcttttttagtttggcaggttttattctgggaccatggtaggttttctgacaaaagtatttcacaaactgatatgattcacttataatgaaataaagttcaaaaattcggaatagtcgttccgaatttcgggacaataaatgacataaagcatatcgtttgctttggcaggagggattctgtgtttcagattgatttaaactgtgatttaggagaaagcttcggagcctacaagataggccttgaccaagatattttagagtgtgtgacatcagcgaatatcgcatgcggatttcatgcaggagatcctagtgttatgcgaaaaaccgtcgcgcttgcagcagaaagaggcgtgaaaatgggtgcgcatccgggcttgccggatttactcggttttgggcgccgcaatatggcgatttctcctgaggaagcgtatgatcttgtcgtttatcaaattggcgcgctctctggctttctaaaagcagagggacttcacatgcagcacgtcaagccgcatggcgctttatacaatatggcggcagtcgatcaaaaactgtcggatgctatcgcgaaagctgtctataaggttgatcccggcctgattcttttcggtcttgctgagagcgagcttgtaaaagcgggagaacggatcggacttcagaccgcaaatgaagtgttcgccgacagaacataccaatcggacggcacgctgacaccgcgctcccagccggacgcactcattgaaagtgatgatgccgccgtcacccaggtcatcaaaatggtgaaagaaggggcggtcaaatctcagcaaggacatgatgtgtcattaaaagcagatacagtctgcattcatggagatggagcccatgcgctgacatttgcgcaaaaaatcagaaaacagctcaaagcggctggaattgaagtgacagctatttcagaacagaggtcaacataaaggaggaacaatagatggagcagcagaaaaagacagcaggaaaaaaagcgggcagctggtcattgctgatgggcgccgcctttttaatggcgacatcagcaatcggaccgggtttcctcacccaaaccgcaacattcacaaacacactcgcagcaagcttcggttttgtcatcttaatctctattattttagatattttcgcccaaaccaatgtgtggcgcatcatcgcagtttctggaaaacgaggtcaggaaattgcgaatatggtgcttcccggactgggatatttcatcgccattctcgtcgtgcttggcggactagcttttaatattgggaatatcggaggggccgggctgggacttcaggtgctgttcggcattacacctgaaacaggcgctttaatcagtgccgttatcgccattttgatttttgtcatcaaggaagcaggaaaagcgatggaccgttttacgcaaatcgcggggttcgtgatgattattttaacggtctacgttgcggcgacgacagctcctccagtcggacaggcagtcgcaaatacattcgtcccggaacacatcagcatatttgccattgtcaccctagtgggcggaaccgtcggcggttatatcacatttgccgggggacaccgtttgcttgatgccggaattaaagggaaggaatccattccgcaggtgacaaaaagctcggttgtcggcattttaattacatctgtcatgcgtatcgctctttttcttgcggttctaggcgttgtatcgaaaggcctgcacatcgatgaaagcaacccggcggcttctgtcttcaagctggctgctggaaatgtcggttataaaattttcggattgatcatgtggtctgcggcgattacgtctgttattggagcagcctatacatctgtttcatttttcaagaccttttctccaaaaattgaaaagaattcacgcggtattattatcggatttattgtggtttctacgttagcttttgtcacaatcggccagcctgcgaagatcctcgtccttgtcggttcactgaacggcttaattctgccgattgcgctcggaacgctgcttgttgccgcctacaagaaaaacattgtcggtgattataagcatccgctttggctgacaagcacaggcgcgcttgtagtgattgtaatggcagttatgggaatctacacgttaattacacaacttcctcaattgtggagctgatataagtggagcaattaaacaaaatggcgccaaaggatgtacgcgccctgatacgagaggggaaaataaacgggccgaccgcaggcatgtctggcggctacgcccaagcgaatcttgtggttttgaaaaaggaccttgcttttgattttctgctgttttgccagcgaaatcaaaagccctgccccgtgctggatgtgactgaagcaggttcgcctgtgccgtctctggctgcgccggatgctgatatcagaacggactttccgaaataccgtatttacaggcacggtatcctaacggaagaagtatctgatattacgccatactgggaggacgattttgtcggctttctgatcggatgcagtttctcctttgaacaggcactaatcaataatgggatagctgtccggcatattgatgaggggacaaacgtctcgatgtataaaacgaatatcgattgtgttccggcgggggcgtttcacggacagatggttgtcagcatgaggccggttcctgaacggctggctgtacgtgctgcacaagtgacctcgcgttttccggctgtgcacggagggccgatccatatcggcaatccgggagcaatcgggattcgcgatctcgggaaaccggatttcggagatgccgttcccattcgtgacggcgaggttcctgttttttgggcatgcggggtgaccccgcaagccgtggctatgaatgtaaagcctgaaatggtcatcacacatgcgccggggcatatgctcatcacagatattcgagacgagtcgcttgcggtgctgtagcctctcgtcatcctgatgaacgagaaataaaagaggtgagaaagatgactgtacgatatcaaatcgaacagctcggtgattctgcaatgatgatccgattcggagaagaaatcaatgaacaggtcaacggcattgtccatgccgcggccgcttatatagaagaacagccatttccgggattcattgaatgtatcccggcttttacaagtctaaccgtattttatgatatgtatgaagtgtacaagcatttgcctcaaggcataagctcaccttttgagagtgtcaagcgcgatgtcgaagagcggctggcagaaatagccgaagactatgaggtcaaccgccgtattgtagaaattcccgtttgctatggcggtgaattcggtccggatttagaagaggtggcgaagatcaatcaactgtcaccggaggaagtaatcgacattcatacaaacggtgaatatgtggtgtatatgcttggcttcgcgcccggttttccttttctaggcgggatgtcaaaacgcattgcagctccgagaaaatcatcgccaagaccgtcgattcccgcaggttcggtcggtattgcgggattgcagacaggcgtttatccgatttcaacgccgggcggctggcagctgatcggcaaaacgccgctggctcttttccggccgcaggaaaacccgccgacattgctgcgggcgggagatattgtgaaattcgttcgcatctcagaaaaagactatcacgcctataaggaggagtccaattgagcatgaaagtattaaagcccggactgctcacaacggttcaggatataggcagaacgggttaccaaaaatacggcgttctggccagcggcgctatggacacggtttcactgcgcattgccaatctgttgataggaaacggcgaaaatgaagcaggtctcgaaataacgatgatggggcccggtccgtcgtttcatttttcaaaacagacactgattgctgtgacaggggcggacttcacgctgcgtattaatgacgaggaagcgcctttatggaagcctgtgctcatcaaggaaaacagcacggtcagctttggcccctgcaaactcggcagccgtgcttatttggcggcagctggcggcattgaggtgcctgccgtcatggaaagtaaaagcacatacgtcagaggaagcattggcggacttcatggcagagcgcttcaaaaagaagatgaactgaacattggagagatgtcagctctttcgcaaaccatcctttcccgcttaagttcgcagcttggaaaacagggatttgcagcaccgaagtggtcagtcagccgcggcagatttctgccattgaagaagaatcccgtcattcgggtgctggaaggaaagcaatttgcctttttcacagaagaatcaaaaacgcgtttttatgaagaagcatttcgtgtcacgccgcagtccgaccgtatgggctacaggctcaaaggagaaccgctcgaactgaaggccccgcttgagatggtgtcggaagcggtttcattcggaacagttcaggtgccgcctgacggcaacccgattatcctgcttgcagaccggcagacgactggcggctatccgaggatcgcgcacatcatatccgctgatcttccgattgtttcccaaatcatgccgggcgagcacgttcagtttgagcctgtgtccctccaggaggcagaagcgcttgcggtagaacgggaacagcatataaaagaactgaaaacgagaatgaagatggaatggctgacatagcaaaggggatgaatgatgcagaataaaaataaaaccgtagtcaaatctatggcgctgcttaatttgtttttgcataaaccaagcctaaccttaagtgaactggtgtcgctgacgggaatgccgaagacctctgttcaccggatggtcagctccttggaggaaatggggttcctcagtagggatgcgtccggcgcttattcgctgggattggtgtttttggaattcggacagcttgtcgctgacaggctggatatcagaaaaatagcgaaaccggtgatggaagagctgtgccgggaagtggatgaggccgtgcagttgatcatgagggacggcaatgaagcgatatacgttgagaaaatagaagggacacagactgtgcggctgtatacggcgatcggcaggcgttcccccctatacgcgggagcgtgcgccagaagcattctgtcctttcttccccgtgaagaaatcgaagcatacatcaaacaaaccgagctcatttcgattggctccggaacgattaccgatcccgaaaaactgcttcaggagattgatgcctctgtgcaaaatggctatactgtcagctattcagagctcgaaaactatacggcggcgatcggcgccccgatctttaaccatgagcgccaggtggcagccggcattagcattgcaggctttgaagcgagatttacagaagacaggctgccctatttaacagaaaaggtgaaggacgccgctttacagatttcaagaaaaataggatatacataagtagccaatcttttctctgctgcgtacattaacgtatcgacgttcaagagtggaggaaagaacatggtgcttcgatatacagctctgggcgattccttgacgacagggagaggctccgggctgttttcacccggcttcgtccagcgttttggggacatgatggaagctgacttgaaaacaagaacggcaataaacatatttgccagatcaggcctgaatacagaagagattttgggactcctgtcatatccctatgtgcaaaaatgtattcgagatgctgatatgataacgatcacagggtgcggaaacgatctcatcgattcggtcttagcctaccaaacctctaaggatgaaacgattttcagccgtgtatccgcccattgccatgagaattttgaaaagatgattgccaaagtcgccgagattaaaggagaaaatccttccccgtacgccattcgtgtgttcaacttatacaatccgtttcccgaaattgatatcgccggcaaatggatcacttcgtttaattcacatttagaaacacttgcatcagcaccccatgtcaaaatcgcggatgcctatagcatcttcaaaggcaaagaacaggaatatctgtcctttgacggtgtccatccgaacagcaaaggctatcaagcgatggctgaagccgttcacaagctaggctataaagaattatcagtttcatagaaaacgcgcctcatgacaggcgcgttttttatgtgtgatcgaaatattaaaagaaacttaaaattctctgtcttctgttctacagacaaacaaagtgcgctagaataatggagggcgtaggcaaatatagccataacgttcaatatttcgtatataaggaaggatggtccttttgtttcggatttttaaaatgtcttttgcggttatcattattatactggcgcttattgcttttaactatacggaacacacctctgttatccaatcggtcatgctcgtctttcttggtgcggtcatgtttatgcaggggcttgaagaacgcaaaaaagaaaatgacggctcaggcgcttttaatatttataccgccgtttttgtatggtctgtctcccttatcggttttacacttcatattatataaatctattacacatcctgaaaatgctcgaccgtcgggaacggggtatagaaccgatgaagcaaggctttccactcttgatactctgaagaaccgcgaaagccttccgtatggtcctcaagtgtttcccactccacaagaagcagatatttatgcgtttcctccatgcattttgataacgagtgcgtgatatagcccttcatgccggaaataatcggcgccgcttgccggaatgcatcctcaaactcttgttcaaggccttctttaatgtgaagcattgctgcctccctgaccatgctatcccttctttctgtcttttcgaatagtctacagcaaacgataggagatttctgcaaaatcggtgaacttttccttcattttcaaaaaaatcttgcacgcaccaattcaattaagagaaaataacaagtggaaggcaggggaaagtcatgttaaaaaagtgtattctactagtatttctatgcgtcggattgattgggttaatcggatgctccaaaacagattcaccagaggatcgcatggaagcattcgtgaaacagtggaacgatcagcaattcgatgacatgtatcaaagcctgactaaagatgtcaaaaaagaaatctccaaaaaagatttcgtcaacaggtataaagccatctatgagcaggccggcgtaaaaaatttgaaagtcactgcgggagaagtagataaggacgatcaagacaacaagacaatgaaacatatcccgtataaagtcagcatgaacacaaatgccggcaaagtcagcttcaagaatactgctgtgctgaaattagaaaaaacagatgacgaggagtcatggaatatagattgggacccatcgtttattttcaagcagctggctgacgacaaaaccgtgcaaattatgagcattgaaccgaaacgaggccaaatttacgataaaaatggaaaaggtttagctgtcaatacagatgttccggaaattggaattgttcccggagagcttggcgataaaaaagagaaagttataaaagaactcgccaaaaaacttgatttgactgaagacgacatcaagaaaaagctggatcaaggctgggtaaaagacgattcgtttgtgccgctcaaaaaggtcaagcctgaccaggagaaattagtttctgaagcgacgtcattacaaggcgtaacaagaacgaatgtcagctcccgctactatccgtatggcgaaaagacagcccatttgacaggctatgtccgcgccattacagcggaagaactgaagaaaaagaaagaaggaacgtacagcgatacgtctaacatcggtatcgccggacttgaaaatgtgtatgaaggcaagctaagaggcacaactggctggaaaatctacgtgccgcaaaccggggaagtcatcgctgaaaagaaagcaaaggacggcgaggatcttcacctcacaattgatatcaaaacgcaaacgaagctgtatgatgaactgaaggatgacagcggggcggcagtcgcgctgcagccgaagacaggcgaaacactcgcccttgtcagcgcgccttcctacgatccaaacggatttattttcggctggagcgataaggaatggaaaaagctaaacaaagataaaaacaacccgttttcagcgaaattcaataagacatacgcgccaggttctaccattaaaccgattgcggctgctattggaatcaaaaacggcacccttaaagccgatgagaagaaaacaatcaaaggcaaggagtggcaaaaagattcgagctggggcggctattcagtgacacgtgtgtctgagagacttcaacaagtcgatttggaaaacgcccttattacgtcagacaatatttattttgcccagaatgcgcttgatatgggagcggacaccttcacaaaaggcttgaagacattcggtttttcagaggacgttccgtacgaattcccgatccagaaatcgtctattgcaaatgacaagcttgattcagacattttgcttgcggatacaggctacggacaagggcaaatgcaaatgtctccgcttcacttggcaactgcttacacgccatttgttgacaatggagaccttgtcaaaccgacgctgatcaaaaaagattcacaaacagctgatgtttggcacaagcaagtggtcacgaaggaaggagcggcagacattacaaaaggtctgaaaggcgttgtggaagatgagcgcggatcagcgtatcagcctgtcgtgaaaggaatcacagtggctggaaaaacaggaacagccgagctgaaaacatcaaaagatgataaagacggcacggaaaatggctggtttgtcggctacgattacaaaaacaaagacctgcttgtcgccatgatgatccaaaatgtgcaggaccgcggcggcagccactatgtcgttgagaaagcgaaaaagcaatttcaatcgaattaaaatgtctttttaaaaggagcgaaaggaaaaagaggatctgaggccgaatgaactagtaaggggcaaaacccggtttatacaaagaaaagagggattttgcatgcagcgtattcaattggcggaggatcttcaattttcaagagtcatacacgggctttggcggctgaatgaatggaactattcagatgctgaacttctaagcctcattgaatggtgtatcgatcacggcatcacgacctttgatcatgcggatatttatggaggctatacgtgcgaaaagctgtttggaaacgcccttgccctttcgcctggattaagagaaaacatagagttggtcacaaaatgcggtatcgttcttgaatcgcctgaacggcccgctcacagatcgcatcattataacacaagcaaatcgcatattttggcatccgttgagcaatcgcttatgaaccttaggacggattatatcgatatgcttttgattcacagaccggacccgctcatggatccggagggggtagcagaggcgtttcaggccttgaaatgctctggcaaggtcaggtactttggcgtttcaaattttaaagatcaccagtatcggatgctggaatcatatttgcctgagaagctcgtaaccaaccagattgagctttccgcatacgaattagaaaatatgctcgacggcactttgaacctgtgccaggaaaaacgtattccgccgatggcttggtcgcctctggcaggcggcaaagttttcactggtgacacggaaaaagaccggcgtgtccgcacggcgcttgaatccgttcaagcagagattggcgccgcttcattggacgaggtgatgtacgcatggctgtatacgcatccggccgacatcatgccgattgtcggaagcggaaagcgcgagcggatttccgccgcgataaatgcgttgtcatacaagcttgaccaggatcaatggttccgcatttttacagccgtacagggttacgatattccataaaaagcatcagcttaccagctgatgctttttcaatattgtcacaccgcatagtgccaaattaccatttataagtgattgattctttcttgaaagcgttttatattaaaaggaaacctctctatatcctctactgcatctccttgcgacttcatccgcacatcaagattgtctaggaggtcttttttatgtatatgactgccagagaacaaaagctgttaaagcacttattattacaaaacagatatataaccgtaactgagcttgctgagctgatgcaagtcagcacgagaaccattcacagggaactcaaatcaattaaaccgctgatggaaaccgttgggcttacgttagataaacagcccggtaaaggtttgaaagcagtgggaagtcccgaagataaacaaaagctgcttactgatttatcatatgaacagcatgaatacagcgccgacgaacggaaactgctcattctttgttcgttattagagtctcaggagcccgtcaaactgtacacgcttgctcatgatctccaggtgacgaatgccacggtcagctatgacttagatgagctcgagaagtggatttctcccttcggactgacactgatccgcaaaagaggttttggcatccagcttatagggccggagaatgcgaaacggaaaattgtcggcaacttgattgtgaaccgtctcgacatccaaatgtttttggaagcggttgaattaaacatcaaaggaaaaaccgattcttcagagaaaatgttcggggttgtcagcaaaggtgagctgttaaaaatggagcgcatcttatttcagctcaaagaaaaaatcgctttttcattgtccgacagctcctatatagcgctcgtcgtccatctgacgtatgctatcgaacgaattaagcttggggaaactatcaccatggagcaaaatgagcttgaggaactgaagaatgcgaaggaatacagctccgctcttgaaatcgcgggcgagcttgaacgtgccttcggcgtgacgattccagaggcggaggtcggctatattacaatccaccttcgaagcgccaatcgaaaatacaaaacagaatacaaagcgcaggaaattgagctggaaacagccctgcaaacaaagcggctcattgcttttatttcagacaaaatcagaatggatctgacgaaaaactactctttatatgaaggcttgattgcccatttggagccggccgtcagccgcataaaagaaaatattgagatatacaatccgatgaaggaacagatcaagcgcgattattttctgctttatatggcgatcgaagaaggtgtcgaaaagtattttccgggcatgtccttttctgatgatgaaatcgcttttatcgttcttcactttggctcggctcttgaaatcaaaaaagaagaagcaaaagtgaaagcgcttgtcgtctgctcaagcgggatcggctcctcgaaaatgcttgcctccagactgaaaaaagagctgccggaaattgaatcgtttgatatgtcatccctgatcgagctaaaggggaaggatgttcaagcctatgatatgattgtgtccactgtaccgattccttatgaaaacattgattacatcatggtcagcccgctattaaatgaggaagacgcaaaccaggtcaagcagtatatcaagcggaagattccccttattcttaacaaaaaaagaagcccgaaggaagaggcgcagcaagctgatgtacctgacatgctagaggcggcggaaagcataggccggtatatggaagttatccaagatgttctgcgccattttacgctagctcaactcaaaacaaacccggaccatagcatgcttctgctagagctttttcaacagctgaagaaggatggcctgatccgtgatccggaaaaagccgcggtttgcctggctgagcgggagaaacaagggggattgggaatccccggaacaaacatggcgctttatcatctcaaaaatgatgaaatcgtcctgccttttttcaaaatgtttgatctcagcacctcctatgaagtggatggcatggacggaaataccctcaggatgacacgcattctcgtcatgatggcgcctagctcattatctgctgaaggctcggagattttaagcgcgatcagctcggcaattatcgagagcagagaaagcatggcggggtttcaggaagaaggagaacaagaattgtatcagcggttaaaccgcatatttttcacatggatgaaagaaaaaaacatactgtaaacctgcatggcacacgtcaaaaatttggcgtgtgtttttctgtggatggggaacaaaataagaaaatgtgggactattttatcattcagtattggaataattccaaaatgaaatagttttacaagttatcttttttgggttaaaatgggtgaggcaaggaagaaaatctaacaaattattgaagattcaagagaatataggagatgacgatatggaaacattacagcatctgattctgcatgacatgccgaatagcgaagaaatagaggctgtaaaaagcggagaccatacactgacatataaaggttaccgtaaacggattaatcagctggcgaatgccatgcttcaaaaaggaattcaaaagggcgaccgtgttgcattgctttgcaaaaacggccatcccgcatcaactgttatgttcgccgcgcttgaaataggtgctgttgtcgtacctgtcagctggcagctgaaaccatatgaaatgacaggcattttaaaagcaagtgaaccgaaagcgatgttttacggagcggagtttaaagagatactggatgaagttctacctgaattgtcctcactgtgtgtaacaatggaaacaggaacagcttacgaaacatctgctgaatttgaagcgctgtttgcaggtcctgatcatttgccagagacggaaatggtttcacctgatgatacagcacttctgatgtttacatctggaacaacgggaaacccgaaaagatgcatgattacacatggcggcatatacagatacgttaaaaaatccaacagctcaatagcacgtatgaagggccttcgttttctcgcgtgccatccgatttatcatacgagtgcgctcatttgcatcatgcttggaacgtttgcagaaacaacctttgtgtttacaaaggatcaagatcctgttcacatgctgaaggtcattgaagaagagaaaattcagaccgtgatggctcttcctgtgttttacacgtatttgcttgaggcgtgggaaacgcaccaaactgacttatcttcacttgttattttaatgacaggcggaacaaaagtgccgagcagcctaatccgccgctatcttgatattggcattccgctcgcgcatggctatggaagcactgaggcttggggcatcagcacatggacgcctgatatgggaatggataaagcggcatctgcaggaaaacctgtggcaggtgttaaagtcaaagtggaagatcctctgaccggagaagaacttcctcaaggagaaatcggcgaaatcgttgttcatactccattcttatttaaaggctatgaagacaatcctgaagcaacagcgaaagtgctgcaaaatggatggtttagaaccggagattcaggatatgtagatgaagatggctttattttcatcacgggacgctacaaggatgtcattatttacggaggcgataacgtctatcctgatcaggttgaagaagttatccagcagatcccgggaatccttgaaacggctgtggtcggtattccagacccgctttacggtgaaaaaccgaaagcttttatcgtgaaaaatggcggccagcgcatcacagaagaggatgtcatcgcattttgtaaagaacgcctgtccgcttacaaaatacctgaagttgaatttgttaacgaactgccgaaaaacaaccttggcaaggtgaaaaaagacgtcctgcgcaatcaggctgtacattcataaaagaagaagcccgtccactttatgtggcgggcttctttgcacttgcacagacggaaagctcaggcttaatgttcttaaattgtatatcaatgtcttcgaagccggctgctttaaagtcagcaatcatctgtcttccaaatgatttggttttttcaggactggcatccgcttcccgcggctgcatcgtaatggctgctttgccgcctggctttaatgcccgataaatctgtttcatgccttttgtttggtcattccaaatggtgtagttgttaacggaaatcactttatcataaaacgaggcggggagaggaaatgtctcgatgcttccttgtatcaggcgtacgccctttggtttcactctgcgggcggccagcttcagcatggcctctgacacatcaatcccatgaagatgaacatccttctcgcgtttcagcatctgctgcatgcagtatcccgggccaaacccgacttctaaaatgctgtccccgcgcgtgatacccagctgattgattgtccactgattcagtgtttgattttcagcagccatgatgtacccggcaatcatgccgatgacgccctttggcctgctgaatcttctagaaagcatgttaatcattcagcaaccaaccccctttttgagttaatttcctcccagcgttccatgtgaaacatttttctgataaagcaatgcgaaggtgccaagccatgtttatccatagagtgtgtgaggtacacaacaaatagacatgaaaacaaaggaggagaatcatcatggcaaattatccaaaagaactgccggcacaaactcaaagtcgccagccgggaattgaaagcgaaatgaatccaagtccggtgtatgagtacgaggattataaaggagcagacaaattaaaaggaaaagtagctcttattacaggcggcgacagcgggatcggacgcgcggtttccgtcgcttacgcaaaggaaggcgcagacatcgccattgtgtataaggatgagcatgaagacgctgagaagacgaagaaacgtgttgaacaagaaggcgtaaaatgcctgctgattgctggtgacgtaggtgaagaggaattctgcaatgaagcggttgaaaaaacggtcaaggaactaggcggccttgacatccttgtcaacaatgcaggtgaacagcatccgaaggaaagcatcaaagatattacgagcgaacagcttcaccgcacattcaaaacaaatttttattctcaattttatttgactaaaaaagcaattgattacctgaaaccgggcagcgccatcatcaatacgacatccatcaacccgtacgtagggaacccgacactgattgattatacagcgacaaaaggggcgatcaacgcctttacaagaacaatggcgcaggcgcttgttaaagacggcatccgtgtaaatgcagtcgcgccgggtccaatctggacgccactaatcccagctacgttccctgaagaaacagttgctcaatttgggcaggatacgccgatgggccgtcctggacagcctgttgagcacgtcggctgttatgtgctcctggcatcagatgagtcctcttacatgacaggacagaccctgcatgtcaacggcggaaactttgtgacgacataagagggagtgagacatatgagcatcacgaaagaagaagtgaacagctactatcaaaaagcagggattgtattaacggacgaggaagtagaccaaatccagctgatggattacggcttaggaaaagaaagaaaagtcgggctccagctcttcgtctacgtcaatacagaccgttattgttcaaaggaattggtgctgtttccgggacagacttgcccggaacaccgccatccgccggtcgacggccaggaaggcaagcaggagaccttccgctgccgctacggaaaagtgtatctttacgtagaaggagaaaaaacgccgcttccaaaagttctccctcctcaggaagacagagaacactatacggtctggcacgaaattgagctagaaccgggcgggcaatacacgattccaccaaacacaaagcattggttccaggccggggaagaaggtgccgtcgtgacggaaatgtcatcgacgagtacggataaacatgatatctttaccgatccaagaatataaggatgggcttaacagcccatcctttttgtattgaaaaaaacagaatcatcgctataatggttaaaaaaggaaagagggcgaggcaatgttcacttgcaaggtaaatgagcacatcaccatccgattattggagccgaaggatgcggagcggctggccgaactcattatccaaaatcagcagcggcttggcaagtggctgttttttgcggaaaatccaagcagcgctgacacgtaccgagaaacaatcattccagattggcggcgccagtatgccgacctgaacggcattgaggcgggtctcctttatgacggcagcttatgcggcatgatcagcctgcataaccttgatcaagtgaatcgtaaggcggaaatcggatattggattgccaaagaatttgaagggaaaggcattattacagctgcctgccgaaaactcattacgtatgcttttgaagagcttgagctgaatcgtgtggcgatctgtgcggctgtcggaaacgaaaaaagcagagcggttccggagcggctcgggtttctagaggaaggcagggcacgggacggcttatacgtaaacggcatgcatcacgacctcgtctactacagtctgttaaagcgtgaatgggaaggcgaaaaataaagagcacactttcttgtttaaatcttccccggatgtggaaaagtaacagcggagacgttaaaaaggagtgattcgagatgaatcagcaagacattaaacaaaaagtgcttgatgttctagatcaccataaagtaggttcgctcgcaacagttcaaaagggcaaaccgcattcccgctacatgacttttttccatgacgggctgacgatttacacaccgacaagcaaggaaactcataaagcagaagaaattgagaacaaccccaatgtccacattttattaggctatgattgtgaaggttttggcgacgcatatgtcgaagttgccggaaaagccaaaatcaacaattcggcagaactcaaggacaaaatatggagttccaaattagagcgctggtttgacggcaaggatgatccgaatctggtgattcttgaaattgaaccggaggatatcagattaatgaatgccggagagaaaacaccggtctcactcgaactataaaaaatttgtgttttcaggggcgatatgttattatgaatagctagtaagaaaaataagcaaataaaaaagaaagtaaacttcttttttctgttttgagagagaagcttaccgcttcccaagcagcataaccagctgcccttattcttttccttcataacaaatcgcccctaacgatgagatggaaaaaagacttttttgttttacaattcacaccggcgcggcttcggagccgcagtgacgattgagaggtagggctttcgttgtcttgtgttcaagaaatttccatggtgtttactttccagaatgattcttcggaacaatgctttatgaatctaacccgcctgacttggcggatgatataatctttatttgcgtatagaaaagaataagacaaaccgcccggcgtacgccggacggtttttttattgcaaaaaacacatcgtactgaaacctccttgtcttctttccagtcttatctctaggatgaaattggaggaagaataacgtgcatgtcattacaacacaagtactttttattttttgttttttattgctgattcactcgatagaaaccttagcctatgctacaaggctttccggggcccgcgttggatttattgcgtccgcgctttctctgtttaatgtcatggtcatcgtatccagaatgtcgaacatggtgcagcagccctttactgggcatttaattgatgctgctggaaaaaacgcactggcgattgtaggggagcagttccgctttttaattttcggatcgacagtcggcaccattttgggcattatcctgctcccgtcttttgtcgctcttttttcacgggcgattattcacttggcgggcggcggcggctccgtttttcaagtattccgaaagggattctcgaaacaaggattcaaaaatgccctttcctatttgcgtctgccgtccatttcatatgtaaaaggatttcatatgcgcttgattccgaagcgtttgtttgtcatcaacatgctgatcacatcgatttatacgattggcgtgctttcggctttatacgcaggccttctggcgccggagcgcagcacgacagccgtcatggcttcgggtttgatcaacggaattgcgacgatgctgctggccatttttgttgatcctaaagtatccgttctagctgatgatgtggcaaaaggaaaacgaagctatctctatttaaaatggacctctatcacaatggtcacatcaagggtggcgggcacactcctcgcccagctcatatttattccgggggcctactatatcgcgtggctgacaaagtggttttaataagaaaggctggatcataaagatccagccttttttgcattcccttatttatatttccttaatccgcggtcgtacaaaaaatttccgaatgggacgaaagcagcgacgaagccggcagctgaccatttcagcggccatttgacagagaaggttgcataagccaagacaagcaaatacaaaatgaacaacccgccgtgaaccgaaccgacaattgtcaccgcaagcggaaggcctgcccaatatttaagcggcatagcgatgaacaacaggattaagagtgacattccttcaataaaacccatcgtgcgaagtcttccgatcggcgtgtgcagcataaatcgccctccttgtggacacgttttcattttatactataaacaatccggaggggcatatgacagctttcaaaaaatgttcggaaaacattcatttttacatgccttttctagggaactgtacttgtcatttacaaaaatacccgagataatgtgtacaaaatcaaaaaagaaggatgttgaaatgaaacttgaccagattgatctgaatatcattgaggagctgaagaaggacagccgtttgtcgatgagggaattaggcagaaaaattaagctgtcgcctccatctgtgacagaacgggtaaggcagcttgaatcgtttggcatcatcaagcaatacacgctggaggtcgaccagaaaaaacttgggcttcccgtttcctgtattgtggaagcaaccgttaaaaacgcggattacgagcggttcaaaagctatattcaaacattgccgaatattgaattttgctaccggattgcaggtgcagcctgctatatgctgaaaatcaatgccgaaagcctcgaagcggtagaagatttcattaacaaaacatcgccctacgcgcaaaccgtcactcacgttattttctcagaaattgacacgaaaaacgggcgcggttagagagtgccgcgtgaagtctgttataataacaggatgagcgcgaaagaaagagaagtgatcaagcatgtcaaaaacagttgtattagctgaaaaaccttcagtcggccgggatttagcccgggtgctgaagtgccataaaaaaggaaacggttatctcgaaggcgatcaatatattgtgacctgggctttaggccatttggtgacgcttgctgatccggaaggctacggaaaagaatttcaatcatggcgcctagaggatctgccgattattccagaacccttgaagcttgtggtgataaaaaaaaccggaaagcagttcaatgcagtcaaatcccagcttacccgtaaagacgtcaatcagattgtcatcgcgactgacgcaggccgggaaggtgagcttgttgcgcgctggatcattgagaaagcgaatgtccgaaaaccaatcaagcggctgtggatttcatctgtgacggataaagcgatcaaggaaggttttcaaaagctgcgcagcggcaaagaatatgaaaacctgtaccattctgccgtcgccagagcggaagcggattggcttgtggggatcaacgccacccgtgcacttaccacaaaattcaatgcccagctctcatgcgggcgtgtgcagactccgacgcttgccatgattgcaaagcgcgaggcagacattcaggcgtttacgcccgttccgtattacggcatccgtgctgcagtcgacggcatgacgctgacgtggcaggataagaaatcaaagcagacgagaacgttcaatcaagatgtaacaagccgtttgctaaaaaatctccaaggaaagcaagcggtcgtagctgagctgaaaaaaacagcgaaaaaaagctttgcgcctgcgctttatgatttaacggagctgcagcgtgacgcccacaagcgcttcggtttttctgctaaagaaacgctttctgtactgcagaagctatatgagcagcataagctcgtcacatatccgcggacggactctagatttttatccagtgacatcgtcccgacgttaaaagaccgtctggaaggcatggaagtaaaaccgtatgcccaatatgtcagccaaattaaaaaacgcggcattaaatctcataaaggatatgtcaatgacgcgaaggtgtcagaccaccacgcgattatcccgaccgaagagccgctcgttctcagcagtctgagtgataaagaacgaaagctgtatgacctgattgcgaaacgtttcctggctgtattaatgcctgcattcgaatatgaggaaacaaaggtcatcgcagaaatcggcggagaaacctttacggcgaaaggcaaaaccgtgcagtcgcaagggtggaaagccgtttatgatatggcggatgaggatgatgagcaggaggatgacagagatcagacacttcctgcgcttcaaaaaggcgacacacttgccgtccgcacgttaacggaaacaagcggccaaacgaagccgcctgcccgctttaatgaaggaaccttgctgtcagcgatggaaaacccaagcgcgtttatgcagggagaagaaaaaggcctcgtcaaaacgcttggagaaacaggcggcctcggcacggtggcaacgcgtgccgacattattgaaaaactgttcaacagctttttaatcgagaaaaaaaaccaagatatttttatcacttctaaaggaaaacagctcctgcagcttgttccggaggatctgaaatcaccggccttaacagcagaatgggagcaaaagctgtctgcgatcgcggccggcaaattgaaatcggctgtttttattaaagatatgaaggcttacgctcaccaaacggtaaaagaaatcaaaaacagcagccaaaccttccgacatgacaacattacgggaacggcatgtccggaatgcggcaaaatgatgctgaaagtaaacggcaaacgcgggacgatgctcgtgtgccaagatcgtgaatgcggaagcagaaaaacgattgcccgaaaaacaaacgcacgctgcccgaactgccataaaagaatggagcttcgcggccaaggcgagggccaaacctttgcgtgtgtgtgcggtcaccgtgaaaagctctctgtatttgaaaaacgaaaaaacaaagacaaagcgcgtgctaccaaacgggacgtatcctcttatatgaaaaaacaaaataaagatgagccgattaacaacgcgctggcagaacagctgaaaaaactcggtttggataaataataaaaaaacctgtgcctatcgcacaggttttttattggacttaggtcctgttttcttaatgttcaaaaaggggaaaaaaagctagcaatctgcatttttttcttttatagtaaatgtactttgtaacatggcagtcatattttcgtctataactatttgtgagcgtctgatttgcttcaggcgacaaagggggatttgcctgtgaggcatgtactaattgctgtcatcttattcttcttatctatcggactttccgcagggtgtgctgaagctggaaacaagacccaaaatcagtcggcgacagaagtgaatgccagcccgctccagccggcggaatatttcatctatcacaatttaatgaatgacaaagggctgatcaaaaccgatttttcagaccagccttcttacttgtcggaatctctcggactgtggatggagtttctgctcagcaaaaatgacgcaccacatttccaggatcaatatcagcatctgactgattcatttctgatgagcaatcacttggtgacgtggaagattcaaaatggccaagcgagcgggacgaatgcgctgatagatgatatgagaattatgctgtctcttgaccaagccgccgcaaaatggggccgcagcgactacgcgcaaacggctagggatatcggcacgtctttgaagacatacaatatgaacaacgggttttttacagacttttacgactcacaggccgcttcaaaggatgtgacgctttcatacgtcatgcctgatgccttagctgtcttaaagaagaatggaatcatagacgaagaaacagaacagcggaatgccaatgttctctattcagctcctttaaaaaatggctttctgccgaagacatacagctcggagacgaaggaatacacatatgatagtgaaatcaacctgattgatcagctttacgctgcttggcatttgccggaaggggatgaaaaagcatctgttttagcggactggatcaagcaggaatttcagaaaaacggaaagctgtacgggcggtattcggcagatacgaaggagcctgccgtccaatatgagtctccatccgtatatgccttagccgtattgtttttgacaaaacagcatgaaaacagttctgtcatcaaagccatatatgacagaatgaatgactttgaaattcatgatccggtgaaatcgtattatggaggctatatgagcggcactcagacgcattcatttgacaatctgctgccgctgttagccgaaaggaagctttttaatgaaaatatcattcagtgaatcacaaaaattatttgcttatttttcagggctcatcgcggccctgtctttgtttatttattatgtgtcagcccagcaatcagaaggtgctctgatccttttcatcacatttggcgtcatcgccgcaggcatctggttcggcccgatttacgcgctggcagtgaccttaatcgtactctttgttctcggcaccttaatgatgtttttccagactggacagacatcgctctttccggctgaggaagggctgcgaatgcttgtcgtgtggggaatcgcgcttttgctgttttcttttatttctggaagaatccacgatattacagcagagcttcggcgctcaataacacggcttcaatccgaaatcaaaagctatgttgctgttgacagagtgactggttttgataacaagcaaaggatgaatctggaactttcagaagaaatcaagcgggcggagcgctacggcaattcttttgtgtttttgctgctccatatgcattatttcaaagagtttaagtctttgtacggtgaaaaagaaacggaccgcctcttccaatatgtcggtcagcaaatcaggacaagcgttcgggaaacggataagaaattccgtccctctgacgagcgtatcgggatcgtgctgacgcacacgcctgctgaacatatgccggccgttctgaccaagctgaagaaacaattggatacatatcagctggaaaatggaaagtatgtgtcgcttacgttccacgtttgctatttgccctaccgcaacgatatcaaaacagctgatcaatttttagaagaactggaaaacgagatgatgatgaatgaactataaaggaatcacattgctatgcgtcatgatgcttctttttttagctattgcgtcttttcccgtttctgcgcaagcgaaagatcaggatgccggcattctcatcatctactcaaccttggacggcaaagagtcgtcacaagtcaaaatgctcgatttgcttgcgggccactttacatcccatgtgacagtcaaaaaagattcagacgttgaagcgtcggatctcaaagggaaagaccatgtgatttattacggccaaacgaaaagaaagctcagcaaaaaattgctgtctcttatcagcggcgtaaaaaaaccggttgtcgccattggctataacgcaggccaaatcagccaattttccggtctttcattagcccgcaaagaaaatgtgtttcaggttcacagcaggtcggaaaaggccgatgtgtctctggaaagcgggcttaacgtgctgagtgtatcaggcctgaaaggaacggcgctttacaccttcaaagccgatgacggcacaacgcattcttttatatggaaaacaaaaaaagggaatgtgtacattggattaacaaatttgttaaatgacaatttgatcgtggcgaaacagctcagagaagctttcggagagaaggcggggacgacgttattgtatttgcgtctcgaggatatcagcccgatgtctgatgaaaaattgctgcttcaagccggtacatacctgcataagcggcatattccttttatcctggcggtcattccggtttatttgaatccggaaacaggcgacaaagtgtatttgtctgatcaaccgaagatggtcaaggtgctgaagaagctgcaaagcatgggcggcagtatcattgttcacggctatactcacgcttatcgctacagtgaaacaggagagggctttgaattttgggatgcaaaggcggatcagccgattacatccggaaatgccgaagaccccccgtccattttggagaaagaacaggacttcccgaacgaacaagcctatcacagctatctcgaaccatttcgggaaaaggaagaaacgtatacaaaacaaaaactgacgcgtgccattgaggatttgacatcatcgggtctttacccgctggcgtttgaagcgccgcattacacgatgtccgaatatggctatcaaatcgcctcgcagtattttacaagcattttcggccaggtccagctcagcagcacaacatggaaaacatccggtgcacctccgtttgtgactgctccttcgatgttgcacggaatgacgctttatccggaaacgatcggctttgtcgacacatcgaagcaaaactcgctcggtgagatggaggagcacatctcccagatgattgattttgaaggcggagtagccggaggattttatcacccgtacctcgggatgaaatatctgccggagctggttgatcagatggaacgcattccagacagtgaatggcttgatttaaagaaaacgaaacaaaccgtcaaaacagacaaagtggaaattcatacaagcggtgacggaacgattcaggtgaaaaacggcgtaagcgcgattgacgagtttttcgatcatcaccggcaaacccctctggaaaaggcgttatggattctctccgctgttgtgctcttatttgtcatcatgtttgtcagttatacgttttacttgagagccacattgaaaaaacgaatttttaaggagagaagaagccttgggtaatacgctgttctttatctcgctaagtttaatatgggttatgcttctctaccacatgttcctcatgcagggcgggtttcgccactatatgaccttcgaacggaatatcccgaagtggagagaaaatatgaaggaactgccgaaggtcagcgtcctcatcccggcgcataacgaagaggttgtgattcggcagacgctgaaggccatggtcaacctttattatccgaaggaccggctggagattatcgtcgttaatgataattcatcagaccggacgggtgatatcgtcaatgaattttccgagaaatacgatttcatcaaaatggtgattacgaagccgccaaatgcaggaaaaggaaaatcctctgcacttaactcgggttttgccgaatcgaacggcgatgtgatctgtgtgtatgacgccgacaacacgcctgagaaaatggctgtgtattaccttgtgctcggcctgatgaatgacgaaaaggcaggcgccgtggtagggaaattccgtgtcatcaatgcggcaaagacgctgctgacgaggtttattaatatcgaaacgatctgttttcagtggatggcccagggaggcagatggaagtggttcaaaatcgccacgatcccaggcaccaacttcgcgatccgcagaagcattatcgaaaagctcggaggctgggatgacaaagcgctcgctgaggatactgagctgaccatccgggtatataatctcggctatcacatccgctttttccctgccgccatcacgtgggagcaggaaccggaaacatggaaggtatggtggcgccagcgcacccgatgggcgcgcggcaatcaatatgtcgtgctcaaatttttggcgcagttttttaagctgaaacgaaaacaaattatctttgatttgttttattttttctttacgtacttcctgtttttctttggcgtgatcatgtcaaatgcgatttttgtagtgaatttgttttatgatttgcatttgtctgttggatttttggcaatgattctctggattttggcgtttttcttatttatgacagaggtcatgattacgttgagcattgaaaaaacagaaatgaacaagcaaaacttttttatcgtatttctcatgtacttcacatactcgcaggcatggattgtgcttgttatctactctttattcgtagaaatcaagcaccgtttattcaagcaagaggtcaaatggtacaagacagaacgatacaatcaacataaaagcgggtgacctttttgaaacaaataatgatttttctcacaagcttcatgctgctggcgatgactggacaaacggctcttgccaaagacgtacaggtcagcggttcgctcctcgggaaaagcagccaagaacaagccaaacagcaggtgctgacaagcgagttgattacactgtatggatcaaaagacagcgcagagctgacgtaccagatcccggcaggcgcctcttcgggcaatcagcaattggtaatcgaatacgaggcatcaaatcttttaatttctccatcatcgttaacggctgtcattgatgatgaaccggtcaagacgttaaagcttgatggtgattccaaacggaaaacagtgaagctgaatctgaataaaagccagtctgcgcaaggctatcacaacgtatcgctgaaattctacggcgtaatgaaagagggcgtgtgcgtcagacaggatacatcaggcaactggatcaaaatttatccggacagccggctgacacttgctgacagcagtgaagcgaagggaacgtcgctggaccattatccgtatcctttcgcccaatctggaaatacagcggaagaaacagctatcgtcattccggataacccaagttcagcagaaatagaagctgctgttaaaacagaaggctatttgaaaacggtggacagcagtgtcagtattgcgtatgtcacggaatctgaactgaaaaaaatcgataagccgacgattgttatcggcgtggacaagcattggaacggcaaagtgaaaaaactgttgaaacaagctgggctacaggcaaaaggagaaaaccttctgcttgcggagcgggtgctgaaagcagagggcaaacagcagccggttctgtttgcgcaagcggcgtccgaggacgcgctcactaaaaaaatcagcgtgatgacagatcagacatatacaggccagctcagcggcgatacactttcaatcagcaagcttcagcagactgaaaaaaaagaaagcgataagctgacccttgagaattttggagcgggtgatatcacaattggagccgacaaaacatcttcagcacattatttttatccggcttcggctgttttagatgaaaaccaatcggcgaagctgtcgcttaaactgaaaaagtctgaaacgattcaagcctcagcgactgaaaacgagtctgcctctcaggccgcagaactgaaagtgatgatcaacggccagccgcactcggtccgacttgatgaattaggaaaagaagataaaaacggattctatcatgtcacagtgaaagtggaccctaaactgctgcaaaaaaaccgctacattgatattcagttcgtcacgaccggcttaaaggaaaacaacccttgcaacaccactgatgaggaaaagtgggtttttatcgataaaaacagtacattatcatacgccatcaaaggcatgtctccgtcagcggattttcaagagtggccgcttccttacgccggaaaccaggatcaaacaacattaatcgtgcttcctgacaccgtaagccaatcgaagcttgaggagctttctctcgtaacggaatcctttggcagcgaagcacagcattcatatacagtaaagaaatcatctgacgttacagcaaaggatgcgaaaggacgaaacctcattttcataggagggatcaatcaattttctcttctgaaggagaaatcatcagatctgcttgtgccgcaggagaagaacggctcgtttgatgtatctggtttcgagatgctgaatgagacgacaaaacaagtggtatttacccaagcatcggtttgggattcacgctatacaatggcagtctttgcaccgtcaaaaggagatggaacggctgtcacaaaagagatcatcagttatctgaacagcaacgatgagtcggcaaccgtccttaatgaaacaaacagccagcaggtgtttacaaaccaccagcagctcaaatcggaaacaaacagttccgatgcagaacaaccaacacaggatcatagccagaaatggatgtatattggtgtgctggcactcattatggtggttgcggcagtgttcatttggattgccgtaagacgcagaaaaagaaagacagatacagaataaaacagaggctattttagcctctgtttttttatttttggtaagtaaattccatttgtggaacctgtcattttatttttttctctcagccaataagcctctttacaacgtgcgggaacgggagtatgatctcttttagaaaacaaatcgcttaatctgaaatcagagcgggggacccaatagaacggctttttgccgttggggtgaatcctttttaggtagggctaactctcatatgcccgaatccgtcagctaacctcgtaagcgttcgtgagaggagatgaatgaaacctgtgttcgatgttatggcacaggggcatccgtttgcctctgtgttttttgttgttcatttttgaatgcaaatcgcatacagagacatcatagcagaaaggactatcatcaacatgtgagagcaagacactgatggatgttttattgttttaattgaaaaatgagaaattaaaaggggaagacatcgatgtatcattcaatcaaacgttttttgattgggaaaccactaaaatcccaagcagctggagagcaaaaactgacgaaattaaaagccttggctatgctttcctcagatgcgctatcatctgtcgcatatgggacagaacaaattctaatcattttggcaacaatcagtgctgccgcattttggtactccattccgattgcggtgggcgttctcatcttgctgctcgcactgattctttcatacaggcaaattatttacgcttatccgcagggcggcggggcgtatatcgtttctaaagaaaatctcggtgaaaaaccgggattgattgcgggcggttcattgcttgttgattatattttaacagtagcggtaagtatttccgcaggcacggacgccatcacgtcagcctttcctgtattgcatgattatcatgtgccgatcgctatttttctcgtgttagtgattatgattttgaacctgcgcgggctttcggaatcggcatccattcttgcctaccctgtttatctgtttgtggtggcgcttttggttctcattgcagtcgggttgtttaaacttatgacaggacaaatagaccagccagcccatcatacaccgctcggcacacctgtagccggcattacgctgtttttgctgcttaaggctttttcctccggctgctcagcgttgaccggggttgaggccatttctaatgcgattcctgcattcaaaaacccgcctgcgcgaaacgcggcaagaacgcttgcgatgatggggattttgctggcgattctgttttccggcatcacggtgctcgcgtacgggtatggtacggcgccgaagcctgatgaaacagtggtttcacaaattgcgtccgaaaccttcgggcggaatgtgttctactatgtcatccaaggtgtcacatcgcttattttggttcttgcggcaaatacgggattttcagccttcccgcagcttgccttcaacctggcgagagaccagtatatgccgcgaatgtttacagtcaggggcgaccgcctaggcttctcaaatgggattatctttttaggcgttgcttccattgtgctcatcctgttattcgggggacagacagagcacttaattccgttatatgctgtcggcgtatttattccatttacgctttcgcaaaccggcatgtgcatcaaatggatcaagcaaaaaccaaagggctggatcggaaaaatgctgatcaactcttgcggcgctttgatttcgtttatggttctgtcgatcctgtttgtgacgaagtttaatgttgtatggcctgttttaatctttatgcctatcgtcgttctgttgttttttgcgattaaaaatcactacaccgctgtcggcgaacagcttcgcatcgtagacaaagagccggaagaaatcaaaggcaccgttgtgattgtgcctgtggccggtgtcaccaccgtcgtacaaaaatcgattcactatgcgaaatcactgtccgatcaggtgatcgccgttcacgtgtcatttgacagagaacaggaaaagaaattcgaaaaacgctgggaagagcttaataacggcgtgcgtctcgttacgcttcactcctcgtatagaagccttgtccatccgtttgataagtttttggaaacagttgaggcgaaagcgaagaaggagcagttttccgttatggtgctgtttccgcaatttataacgaaaaaacgctggcacaccatccttcacaaccaatcagccttcctcctcagagtccggctgttctggaaaaaggacataatggttgccacactgccgtatcattttaaaaagtaaagctctaggaccaagggaatcaccttggtccttttttgcggaaaaaggaggtatggcggtgtatacacaaggtgcttttgtgatcgtactgaacgaaagtcagcaggttctgctggtgaaacgaaaagatgtccctttatgggatttgccgggcggcagggttgatcccggggaatcggctgaggaagcggcagtgcgggaggtattggaagaaacgggatacaatgcagcgctttctgcgaaaataggtgtttaccaaaggccaaagtttcaagatgaacagcatctgtttttcggaagcataacaggcggacaagcagtggctgacggcacagagacagcgggattaaagtgggtttccccggagcgtttgccgctttttatggtgccgaaccgaaaaaggcagatcaatgatttcaagaatggcgctcaagatgtaaatgtcaccgtcaaggatagagggttgctcgcggcgatcgacctgttgaaaagaagactgggcaagtgattcaggtctccgggttttaaagcctttctcctgtggtattgaaaaaaggaaaaaggaggatacgttatggcacacaaaactgcaggacaagcaatgacagagctgcttgagcaatggggagttgatcatgtatacggcatccccggagacagtataaatgagtttattgaagaattaagacacgaaagaaatcaactgaagttcattcaaactcgccacgaagaggtagcggcactggcagccgcagctgaagcaaaactcaccggcaagatcggagtctgtctgtcaatcgcagggccgggagcggtgcacttattaaatggtttatatgatgcaaaagcggacggcgcccctgtgctggcgattgcaggacaggtttcttctggcgaagtcggacgggactatttccaggagattaagctggagcaaatgtttgaggacgtggctgtgttcaacagagaggtacatagcgcagaatcacttccggatctcttaaatcaggcgatcaggaccgcctacagcaaaaaaggcgttgcggtattgagcgtgtcagatgatttgtttgcggagaaaatcaaacgggagcccgtgtatacttcaccggtgtatattgaagggaaccttgaaccgaaaaaagaacagctcgtcacctgcgcccaatatattaataacgctaagaagccgattatcctggcagggcagggaatgaaaaaggcgaaacgggagctcttagaatttgcggacaaagccgccgctccgatcgttgttacactcccggcaaagggtgttgttcccgataagcacccgcattttctcggcaacctcggtcagatcggaacaaagccggcttacgaggcaatggaggaatgtgatttattaatcatgctcggaacgtcattcccgtaccgtgattatttgccagatgacacgccggcgatacagctcgattcagacccggcaaaaatcgggccttgtctgcgattcggctctcggtctgcgcgaattgacagagtatattgaacgcaaggaagacagaagattcctaaatgcctgcacagaacatatgcagcattggtggaacgaaattgaaaaagatgagacagaggccacaacaccgcttaaacctcagcaggtcgtggcccgtcttcaggaagcggcagccgatgatgcggtgctctctgtcgatgtcggcactgtgacagtctggatggcgcgtcatttcaaaatgaacgcgaatcaggatttcatcgtctccagctggcttgcgacaatgggttgcggcctgccgggagcgatcgccgcaagcttgtccgaaccggaacgccaggcgatcgctgtctgtggtgacgggggattttccatggtcatgcaggatcttccgaccgctgtcaaatataagctcccgatcacagtcgtcattttaaacaacgaaaatcttggcatgattgagtacgagcagcaggtcaaaggcaatatcgactatgtcacaaaacttcaaaatgtcgactatgccgcatttgcagaaagctgcggagcaaagggcatcaaagtgactaaagcgggagagcttgcgccggcattccatgaggcgctgcaatctgaccaaccggtcgtagtggatgtcatgattggaaacgaaccgccgcttcctggcaaaatcacctacgggcaggcgaaaggctttagcaagtacatgctgaaaaacttcttcgaaaaccaaaaatttgaaatgccgtcactgaagaaaagtttgaaacggttattttagaggcccttttagaggcctctttttttgtgttggaaacaaatgtatttcaggttatccttgtattatattggtatgaggaggattacatgtttgagttcataaaattattgttgtatgtattaggatctgcaggaatgatctatgcgtcatatcacgattttcgccatgctcagaacgggcaaaaggacaaatgcatcttctttcaaagcaaaaagaccagcgcatttgtccttgtatgtttcatttgtttattcttatcaaatctaacagagctcttctcagtatagggttatttctcttttttcttcagcccgaagaagaaaggaaaagcagaaccgaccaagaaggtgccgaataaaaacatgccgccgataaacacgtggaaatttgtgtgtccggccgtaaacgccgtgattagggaaataatactgagcacgatcatggcaatgccgggcgcgactctcatttttcccttggatttatgggcagcaacagaacataaaatgccgataacaataggaacaatccacaaataaaacagaataaatactgacatcatcaaaactccgatttttcttctatcataacaaatttctgtcaaaaagggtatcaaagagcttttgcgaaaaaataaaaaccggctttagaagccggtttttttatcgaaacgtatctacaattaaaaacacattcaaagcaacgatcaatacagcaatcagccaagacaccactgtgacccatttggcgttgatcagagatcccatgatccgtttattgcttgtaaacataataagcggaatgagggcaaaggcgatcccgaaggacagcacgacctggctcagtacgagagcggtcgtcggattaacacctgacgcgatgatcaagatcggcggaatgatcgtgataaaacgccgtacatacagcggaatgcggtagttgataaatccttgcataatcacgtcgcctgaaagtgtgccgacagacgaactggatagaccggcaacgagcagcccgatcccgaataaagccgcagacatagggctgacaagatgtccgaattgctgaaatgcgacgtcgagatcctcaacaaacaggccgtttttgaagaataatgcggcagccacaatcagcatacttgcattaatagcccctgcaatcagcatcgctattaaaatatcaataaattcaaacctaaagatttttttccgttctgcatcagttttgccaaccacccgccgctgtgtaagggcagagtgtaaataaatggcgtgcggcataacagttgcgccaagaatacccgctgcaagaagcacactgtcggtgccatgaaacgccgggacaaaaaggcccttcatcactgacacggcatcaggctttgcgaaaaaggtctgcagcgcaaaggcgatcacgaccacaaacagcatgccggcaataccggcttcaagtgagcgataaccgcggcgctgaagctccaatatcgcgaaagaaccgatcgccgcaataatagacgcttcaagcatcggaatgccgaacagcaaatacagtcccagagccgctccgataaattccgccaggtcagttgcgataatgacaagctcgccctgaatccataatccgatcgagacaggcttcgggaattcttcacgggcaacctcaggcagatttttgcctgtcgcaataccgagtttggcggatagggattgaattaaaagggccatgatattagaaaataagatcacccataagagcatatatccgtatttagaacccgccgaaatattcgttgcgaagttgccgggatcaatataggcaatggctgctataaatgcagggccgagaaaagggagcagccctctgaatcctctgattttcccgtcaagcgcatcttggacggctttggaacggggagattgtgctgtgatgtccttgttcatcatgtctcacctgaattctgtttgtttttgccgtacaacaaagagtttccttaaggcaaattattttatctacatcatatgaccatcccggtttcttgtcaaccgaaaatgttcaaaatacacttctgaatttttccctgttatgtaacatgatatgtaggaattcgggataaggtcccatataaaaagacatcgtttcagttcgaaacgatgcctcctgtatctaatgagtctaggcttccttccgcagcccgcggaatataaggcccagcaagaacacgaagatggctgccccgatgatggccgggaaaatagcaaagccggcgaggctcggtccccatgtgccaagaagtccgtgcccaatccaagcgccgatcagcccggcaatcatagagccgaaaattcctcccggcagccggtttcctacaatggcgctcccaattaatccgataacaattgcaacaactaatgaaaccaaaaagctaagcatcatgatcacctctcataaatgatttaccaatcaataaccgctcctgatcatttcgaaacacttaaaagcatattcctttatgatcctgttttaatctttctctgcacactgccgtcagctaaatgaacaatgacctcagtgcctttatgcgccgcgatttcctttgcccgttcaatcgcttctttctttgtatctttgatttcagacacacgtttggcgccctcggctttgactgcccagccttttttatgcttaataacatgctctgctttattcatgagctcggggccgctgccgctgcttggatcagcatcgcgttctgtctcatcatcatgcgtcaggaaatcatcaatttcatctgtagaggcgttttccgcccattccttcgctttgcttgtcgcaattggaatcgcgcgcccttcctcatagccttcatcaatcatcgcattcgcaatgtctatcgccttttttctcaccggcttctcaagattttttaatgaagcaggataatccttcatcgaccaaggcatgtccatcactccttttccttttataaaaatggtacccgcaggtgaaaaataaaaacgcatccgaaaaaatgaaggtatactatatagtagaaaaaacggaagggaagtgcggattgggtgccaacagaacgaaaagaagacttacatcagcaattaaaagagatagagaaatgggaaaaagatcagcaaaaagtctggttttgggaaaagctcagccgtctcccgtttcaactcctggacaagctgacaccagaattcatccagaaaaagatcggcaagctcttggatgaggtcggcagctttgttcaaacaggcggacagtacctgacatctgaaaaacagattatcaggatatttcaaaagaaactgccggaggagatctttgaatcgctggaggacatccggaaggcgcctctttctgtcatggatgaaattgcggaaggaatgggcaaaaatagaaccaacgcagcaaccgttcaaggcgcgacaaccggtgtgggcggcgtgtttacgctggcggcagacattccggcagtgcttggcttatcactaaaaacattacaggatatcgcagtcgcatacggctatgacccaaaggagaaaaaagaacgagtcttcattgtgaaatgcctgcagcttacgtcggctgatgttgtcggcaaaagatcgattttgcaggaattaaaacactacgatcaagaccgtacatataagaatgtcgcttctcaaatccaaggctggcgagaagtcgttttgggctatcgagacacgtttggctggaaaaaacttttccagatggtgccggttgccggaatggtttttggcgccgctgccaatcgctcaacattaaacgacattaccgagacaggcatgatgctgtacaaaaagaggcgcattcttgaacgactgaaagaaacagaacgagagatggaatagcagaaagcagacggacaccgcgatccgcctgctttttttagtggaaacatacccaatgtgttttgtttgtttaaaagaattgtgagcgggaatacaacaaccaacaccaattaaaggaggaattcaaaatggcagacaataacaaaatgagcagagaagaagcaggtagaaaaggcggagaaacaacaagcaagaaccatgacaaagaattctatcaagagattggtcaaaaaggcggagaagccaccagcaaaaaccatgacaaagaattctatcaggaaatcggcgaaaaaggcggagaagccactagcaagaaccatgacaaagagttctatcaagaaatcggtgaaaaaggcggagaagccactagcgaaaatcatgacaaagaattctatcaagaaatcggccgaaaaggcggagaggcaacaagcaaaaatcatgataaagaattctaccaagaaattggctcaaaaggcggaaacgcccgcaacaacgactaatcaaaaacataaaggcagacaacctgtaaataaaaaagcgatccggcacatcagctggatcgcttttttttggaatcttctcaatttatgccactattgcgatacaataagtgaaaaaggggttttcgctaatgtccaagatgcaaaacttgctcgccatcgcaaatgaagtcaaagaaaagcacgccaatttttcaatctcagaggtcaacgaccactgcgtgcgccttgcggtgtttacgggagaatatgactggcaccatcaccctgactcagacgaattgtttattgttcttgaaggggagctgctgatcgattttaaggacaaagaaaccgcggtgctcaaagcaaatgacagcctgctgatcccgaaaggcacggttcaccgcacacgctcttacgtcagaacggtaaatctctgtgtggagcataaacaagccgaaaccgtcatcatagaggagcagccatgctaatcaaaaagatgatatgtgaagtagacgctgcaaacgctgaagcatttgcaaaagcgcagtcacagtgggaagcattatcgcatataagcggctttatcaaacaggccggcggctggcgaaaaacgatagacgagccgctcaccgcagaaatcatcagtgtatgggaaaacagagaagcctatgatcattttatggagaacgaacatgacagcatatacgaggaaaacgatcagaaggctgtaattctttcgatagaggtgacggtgtacgaagaggataaaccgttcgtttatgatctgttacataaccccgatatccggtacgaaccaaactggacggttctgaaggcataatcaaagcccaaaacatcatattttgggcttgtctctttactcgcgtcccggaagtgtattatgaacaaaaggcggtgctggttttaactccggtttttctccaaacgtttttgcttctttcacatattcaaaggcttctccgtccggcgctttttcattcagccagttttgctcggcgctttcttcgccttcagagaaattgataagctgatgtgagaactcttgtttttcgagcgctttcgggaatgtacccggcacaaccggaccttcctgtgcttctaattctttaatggcggcaagccattggttctggtgcattgtgtcacgcgccagcaggaagctgagcatatctttgacgcctttgtcatccgtcatttcaaacaggcgtgcgacctgcagacggccctgtgattctgcattcaggttggcgcggaagtctgccagcaggtttccgcttgctacgatataaccgccgctccaaggtacgcctgtactgctttccggcatggcgccaagtcctgatacaatcgcatggtgagggttcatgccgcctaggatggagccgatgaccggatcttcagcagctttttcctgctgatcaagaggggcattctcaagaagtctggcaatcatcgttgcgatcatttcaacatgcccgagctcctcagttgccgtatccatcagcaagtccttgtatttttcatttcctcttgtgttccagccttgaaataagtactgcatggcaactgaaatttctccgaattgcccgcctaaaatttcttgcatttttttagcgaataatggatctggacgatctggtttagcaggatgctgcagcatttttgtgtgcttaaacatgtacccatctcctttttcgattatctctttttatatttccgatcgatagaaagataaacgaaaaacagcgtatcgagatgggaactatgaatcttttcgcagctccaacagttcccggatcagctcccggccgaagatgggctcatactgccggtaaacagggtcaagacgcttcatccattcttgtttctctttatctgacagctcataaatatgtatagcagaattctttttgatttcttccagctgctccttgttcatttgttcggcatacgtttcattccactccgtcgtctccttcatcgcttcagtcaaaatgcgccttgtttctggtgtttgcgccttccagaagtgttcatcagtcatgacagcgtagccgagataaccgtggctgcttattgtcaaatagtcctgaacattataaaattttttagaatagatgtttgaaattgtattttcttcgccatcgactacattgttttctaacagctgaaaggtagaattgaaggattcctgatgaggtgttgcaccaagcagcttgaactgatcctcaatcacatcgctttgcataatgcgcagatgctgcccttttaaatcatccggtgttttgaccggcccttgatttgttgtgatttgcttaaagccgttcgtccaataggccagtccttttaattggtttttctttagagaatcaaacagctgtgtgccgatgcttccgttcagcccttttttggcggcgttgtaatctgtaaaagcatacggcagatcaagcactccccattcaggcgagagcatgccgagcttcgatgtggagggggcgataaattgaacatcgccgttttgcaatgcttcaatttcttcaatgtccgagtacaggcttccattgggaaatacttctatttttattttcccgcctgatttttcgttcaccagatcagcgaatttattggcggcaagcccttttggcgtattttcagcaaccacgtggctgaatttaaacacgatttgatcctgcaggccttcctggtcgtcatcataaacaatctttttattgcctgtatgatcatggaatccgataaataaagcggttgcaattccagcgatcatcagtgcgagacatgcaagcaaactcttcatgaaaagccctcccctatgttaaggataatgggggcaatgacattcgtaaagacctgaaaggagaagctgatgaacaaaaagaagctctcaatccgttggaaaatcacgatcttatcctatatactcgtcattttctcctttttgatcggcggcattgtgctcatcggcaacattcagcatacagaggagcgggagctgaaaaagcggctgatgaatacggcccggacggtgtcagagatgacagaagtgaaagaagccttggcgcgaaaaaaacaaacagaagctgttcgccatgcggttgaagaaatcaggatgattaatgaagcagactatattgtcgtcatggatatgaatcacatccgatatacgcatcctgtcagcacaagcatcggcaagaaatcagaaggtgcagacgaggaggcagcgtttgcggagcacatttatttctctgaagcaaagggcgagctcggcacggcggttcgcgctttttatccggttaaggatcaagacctgaaccaaataggcgtggtgcttgtcggaaaaacgctgccagggatcgctgacatcctgcttcatttaaagcgtgatatcgccttcatcgttgtgctgacactcggctttggccttgctggttcctttttgctggcccgccatatcaaaaaacaaatgtttcagcttgaaccccatgagattgtccgaatgtatgaagaacggacagcgacgtttcactcgatgaatgaaggggtgatcgctattgacaatcggctcgtcattacgatttttaatgaaaaagcgaaacagatctttgaagtgcagggggatctgatcggcaaggtgatttgggaggttctcaaggattcgcgcctgcctgaaatcgtggagcggaacaaagcggtttataatgaagaaattcgtgtcagcggaaaagtcatcatgagcagcagaattccgatcgtcatgaagaaaaaagtgatcggcgccgttgcgatttttcaggacagaacggaagcggccaagatggcagaggaattgactggtgtcagaaactttgtggaggcgctccgtgtccaaaaccatgagcatatgaataagctgcacacgatcgccggcctcatccagctggggaaatctgaaaaagccttgcagcttgcattccaggcgtcaactgagcaggaaaatgtgactgaatttctgcaccgctcgattcaaaatgacgctgcggcaggccttctattaagtaaaatcagaaggggaagagagctcggcattgctgttcatatagatgaaaacagcagtcttcagcaatttcccgagcatgttgatcagcatgatattgtcgtgcttttggggaatctgattgaaaatgccttcggctcatttgaaaccgttcaatctgaagacaaacgaattgacattagtatcgaacaaacagatgatatccttgctattttaatagaagataacggctgcggaattgatccggcacatatgcctcgcctttacgacaaaggttttacggtcaataaaactggcggcacaggctatggcctgtatctagtgaaacaaatcatagacaaaggatcgggcacgatagaagttgattcacatgcggggcaggggacatctttttctatcgtttttccaatgaagggggaggaagcacagcatggctcgtaaagaatggaaggttctgctcattgaagacgatccgatggttcaagaggtcaataaggatttcattacaactgttaaaggcgttactgtctgtgcaacggcaggaaacggagaggaaggcatgaagctgatcaaagaagaacagccggatctcgtcattctcgatgtgtacatgccgaaaaaagacggcatcaagaccttgcaggagatcagaaagcaaaagcttgaagtggatgtcattgtcgtctccgctgcaaaagacaaggaaacgatctcactcatgctgcaaaacggggcgattgactatatcttaaagccgtttaagcttgagcgaatgagacaggcgctcgaaaagtacaagcaatataaacaaaaaatcgaagcgaatgatacgctgtcccaggaacagctcgatgcgatcctgaatattccgcagcaggccgtacaggatctgccgaaagggttgaatcacttcacgatgaatgaagtcactgcttttttgaaacagcaaaccgcatccctttctgctgaagaggtcgccaaggcgcttggcatcgccagagtgacagccagacgatatcttgattacttagaaaaaaccgggatcatcaaattggacgttcaatacggcggagtcggccggccggtcaaccgctacgtgttaaaaggataaacctgagaccaaaaagaccaaaatgtccgttatgatcataaacttccccagacattatgaaaacgctatcattatagtaagaaagacacaaaaggcgaataggacagggggatgaaggatatgaaactgtttaaaaatttaacagttcaggtcataaccgcggtcatcatcggggtcattgtcgggctggtctggccggatgtcggcaaagaaatgaaaccgcttggcgatacatttatcaacgctgttaaaatggtgattgcaccaattattttcttcacaatcgttctcgggattgcaaaaatgggcgatatgaagaaggttggaaaagtagggggaaaagcgtttatctatttcgaggttgtcaccaccctcgcactcattatcggtttatttgtcgtcaatattatgaagccgggtgcgggtcttgattacagcaagcttgaaaagggtgatgtatcacaatacacgcaaaatggcggtcagggaatcgactggattgaatttgttacacacattgttccatccaacatggttgatgccttcgcaaaaggggacattttgcaggtcttattcttttctattcttttcggagtgggtcttgcggcattaggcgaaaaaggaaaaagcgtcattgatttcttcgacaaggtttctcacgtttttttcaaaattatcggctacattatgcgtgccgcgccaatcggggcattcggggcgatggcgtatacaatcggacacttcgggctcgattccatcaaaccgctggcaagcttaatgatgtctgtttatattacgatgttcctgttcgtatttgttgctttaaatatcatctgcaagctttacggattcagcctgtggaattaccttcgcttcattaaggatgagcttctgatcgtgcttggcacaagctcttccgaatcggtgcttcctcgtatgatggataaaatggagcgctacggctgttccaaatccgttgtcgggctagttattccgacgggctattcgtttaacctcgacggcacatccatctatttatcaatggcgactgtctttttggcacaggtgtttggggtagacctcagcatcggccagcaaattacgattatcctcgttctgatgctgacatcgaagggagcggcaggtgtgacgggaagcggatttatcgtccttgcctcaacgctgtcagcgctgcaggtcatcccgctggagggtcttgcactcctgctaggggttgaccgattcatgagtgaaggaagagccattgtgaacctgatcggaaacggaatcgccacgatcattgttgccaaaagcgaaaatgaatttgatgaagcaaaaagcgtagaggctgtggaaggcatgaaaaaaatgaaaacagcagtctgaaaaaagaacggcccatccatggggccgtttttttaattgtttaagaattattaaggtaaggacagagacctcagcatttttttgttatataatttacaaatggatactatattgaatgaaggacgtttgtcctaacaggagtgtataaatggccgctttagttaaattttttcagcacccgggagtaaggcgtttctccatctttgtcgtgttaactggtgtgttatatctatttaagagcatgatcaacttaatattgcttaccttcattttcacatttctaatggatcgtttggagcttgtcgtgcggcagtttgtaagccagttcttccgcgtgagccagcgggttgtcattacgtttctttacatgttgctggctgtgctgcttacagtcgggggctttgtgttttatccggtcgtcgcggcacagatccagcagctggtaaagcagattaaacatattgcgtatcatcctgacagcatccctttctttgatgagatcaccagtgtcttcggagatattaacatcagttcatatgtcaaagagggcttcaatgtagtgtatacgtatctggccgatatcagcacattcggcttgcaggtcgtgatggcgctcattctcagcatgtttttcttatttgagaaaaaacggctttctgaattcatggcgaaatttaaaacgagcaaactgagggtcttttatgaggagattgcttttttcggaagcaaatttgcaagaacgttcggcaaggtgctcgaggctcaatttatcattgcgctcgtcaactgtattctgacgtttatcgcgctttggattatgcattttccgcagctgtttgggctgtcgattatggtgttcttccttggattgatccctgtagcaggcgtcgtcatttccctgattccgctcagcattatcgcctacagcactggcggtggaatgtatgtgctctacattgttcttgtcatattcgccattcatgcgatcgaaacctatttcttaaatccgaagctgatgtcggcgaaaacagagttgccaatctttttcaccttcacagtactcattttctctgaacacttcttcggcatttggggtttaattatcgggattccgatctttgtgtttctccttgatattctggatgtcaccaacaaggaagataggtctaaaggtccccgagagaatagcgataaaaagtagtttaaaatcgaataatgagtgtgcctcgatctgccggcctgcctgttcagggcatggaattaagactcggaatcggagtttggcattgcttcgcacagtggtgaacacaacaggtgacaatgcctgtcatcattacagaaactgaaaagaacaaacagtcggagcaaacgctcatcatcggtttaaccaaacatttggaagcaacaaatgctataatacaaacagtgcctaatgttgggcactgtttattttttgtcgaaaaaggaggaaggctttatggctgagccgattttacatattgaaggcctcgataaaaagattgggtctaaacagattttaaaacagatcagcatggacgttatggagggcgaaatcatcggcctgctcggtccaaatggttccgggaaaacaacactcatccgtatcatcgtcgggctgctgaaacaaaacagcggaagcgtgacaatcagcggattccagcatgatacagagtttgaaaaagcgatggaagcggttggagcaattgttgagaaccctgagttctatccgtacctgacaggctgggaaaacctcaagcactttgcgaatatgcacaaaaaaatagcggatggacggcttgatgaagtggtagaacgtgtcgggctgacgtcagcgattcatgataaggtgaaaacctattcccttgggatgcgccagcgtctgggaatcgcccaggcaattcttcaccggccgaagcttctcattctagatgaaccgacaaacggactcgatcctgcggggatgaaggattttcgcaatcatgttaaggaactcgcagaaatggaaggaacagctgtcctgttcgccactcatttattgcgcgaggttgaagacttgtgcgaccgtgtcatcatcattcaaaaaggtgagatcaaagcggaagtcagcttacaaggaactgatcaaaccacagaaaaagcaattatagaagtgcagccgcaagaaaaagcgctcaattggcttacaggcaatcaatatcaagctgagagccaagacgggacgattgtagttgaggtggcaaaagaaaacataccggagctgaaccgatcacttgtcggacaagatctgaatgtattttccattacgccttacacgcagtcactggaagacgaatttataaaagcgacaacagctcatcaagaggagggagaagagcttgtctaaattaatttggaatgaacatatgaaactttttaatcggaaggtcactttggtttctcttatcctgatggctgtctttcaattcttcatggcattgatcattaaacggattgtcatcagtgccggaacagatgaaaacttcatcggctatttatcgtatacaccgagcctgaacattttgctgcaggctttaacgatcgtaattgcagcaacaattgtttcgatggaatttgataaaaagacgatcaaatttttgctcattcgtccggttaaacgccaaaaggtcttttggtcaaaattaatcacagtcgtgatggtcagcttctatttgtatctggcatactacattctcgcattattattcggtctcgtgttttttggcacatcggtgactgcggaatcaaagacattgctggtcaacaccttggcgctgatcgggtcaaactggcttgaagctgtaatgatgggattattcgggctgctttgttcttcgctgttccgcaacagcgcggtagcagttgttgtttcttttgtcgttttatacggagcgagtacacttgttcagctcatgaagttgtttgaaaacaagtggggcagctttttgctttttgcgaacactgactttacgcaatacagaagcggagagacagcgttgttttcaggcatgacgccattgttttcaattggaattctcatcatacatgccatattcttcatcgttgttggctggtggtgcttctgtaaacgggatgttcgggtctaaaggcaaggaatgacatttttgtgaaaaagctcacgtaaatcaatatcatttgatattttggtttatactaaaggtactgacggaggtgtctcgattgaggaactttattaccgctttaccgatcatattgctgcttggattctcatttgtgtctttcatgtttcagtttgaacatcttgtttatttcaggctcgcgcttgggttgttttctctcgtgggactgtacatgatatataaaatgaagacgggcatccgctattttatcatctatctgtatgccagctggattgtgttggccgcagtgaccgcttttgaagagccgattttctcaagctttttctttggcggcctggtgatgaccatgggttacctgacatatatgctgatttatctcggcatgaaacaagaccgggatgcaaatcctgtgtaatcgcgctgttcccttggggaacggcgtgtttttctatactgggcaaaaggttaacagttgcggaaaaatggcagggaatctataatacatattaaatttatcggaattaaaactggggggctgccggatgtcattatttatacaaaacgatcaacagcggcaatggatggagaaaatcggacggattgcggatgaatttcagcaaacagctgctgaagatgacgaacagggacgttttcctgcagagaaaatacaaaaactgcgtgatgctgggtatacagcattaacattgccggcatctcatggcggagggggcatttctgtttacgatatgctcctgtttcaagaacggcttgcacggggagatgcttcgacggctcttagcatcggctggcatttgagcgtgatcggggagcttggagaaggcaacagctgggatgaagacgtatttgcatttgttgccaaggaagtccaaaacggagccgtcattaacagggcggcgactgaagcgaaaaccggaagcccgacaagaggagggcgtccgggtacacacgccgtcaaaaaggatggcaaatgggcagtgaacgggagaaaaacctttacgacgatgtcacaagctctggattattttttagtaaccgcatggattgaagacaaacaaacaacaggcgtgtttctcattcataaagatgatcccggcttgtcgattgaagagacgtgggatatgatggcgatgcgggcgactgggagccatgaccttgtactgaacgaagtaatgcttgatgagaataagctggtggaactgcttcaagggcctcgtggagctaagccgaatggctggctgcttcacattcctgcgatttatcttggtgtggctcaagctgctcgtgactatgcagtgcaatttgcatctgagtattctccaaacagcttgaatggaccgatcaagaatgtcccggccgtacagcaaagaacaggcgaaatggagcttgaactgctcaatgccagacactttcttttccatatcgctcaattgtatgacgatccggagcggcgtccacacttgaccagcgagctcggtgcggcgaaacatatcgtcacaaacgctgcgctgtctgttgttgataaagcgatgagaattgtcggggccaaaagcctgggacgaaccaacccgcttcagcgctattaccgtgatgtgcgcgccggtcttcacaacccgccgatggatgacgccgtgatacacaagctggcagctgaagcgtttgagtcataaaaaaaagagccttaccggctctttttatgtattgttttgctcttgcagatttttttgatgcttgcggtcaattctgtcataaataacgttcatcagctttggattgcccataatcgcctctttgttttcctggatcagctgttggtaagttttcactttacgcttcggcatgctccggcgccctcctgacatgtttgtattcactttctaactccgtcagcgacaattcatacagatgacgctttgactttttgtatataccattctgtattaacagatgaatgagctgtttttttctgatttctgcagactgaggtgtcattgtgtcaccaacctccaatcaaacgatattgataatcattatcaattaacttcagtatacaatgtccgcaatagcctgtaaagatgaaaagagtcctattctttctccaatttacaaacattcaacaaatcgacaaaaagtttcccgggcaataatttgctgtcgaaatattccgcttcattgaacgcaccctgctatttttcatgttttgaaccatactatgtaatagaatggaggctggtattcaatggagcggacagaaaatctgaaaaagggagaaaaaggggcgctcctcaatatttttgcatatgtcatccttgctgttgtaaagctagttatcgggattctatatcattctgaagcgctgagagcagacgggttaaataatggaacagatattgttgcgtcagtagcagtgctgataggattgcggatttctcaaagaccggctgacagcgatcatccatacggccattatcgggctgaaacaatttcgtctcttgttgcgtcttttattatgatggcagtcggcattgaagtgttaatcggcggaggaaaagcgattgcgggcggcacaacggaaacgccaaatcttatcgcggcatggacggcgttaggcagtgctgtgtttatgtatggcatctatttatataacaaaaggctggcagcgtccattaaaagctctgccctgatggcagcggcaaaggacagcaggtcagacgcttttgtaagtgccggcgcgtttatcggtgttttttcgtcccagctgaagctgccgtggattgatccggtaacggcttttatcatcggcatcatcatttgcaaaactgcgtgggatatctttaaagacgcttcacattccttaacagacggcttccatttaaaagatcttgagccttacaaacagaccgtcggcaggatcgaaaatgtgcatcgcctaaaggatgtgaaagcgaggtatttaggcagtacagttcatatcgagatggtgattacggttgatccgaagcttacagtagaagaaggccatggagtggcggatgaagtagaagacaaaataaaacatgaacacgatgtcactcatgttcatgttcatgtagagcctgacgacataaaataaggctgtttaacgaattagcttatatgttcagataaaaattcagtcacttcttcaggcgttttggcattggcgctgtgaaggtgagctgttttttcaccgttcttgaaaataagcaggctgggaatgcccattacttggtatttttcagccaggtcaggaagctcgtccttattcagctcataccaatcgttttgattgtattcttccaaaatatcgccgatgaacatattcatgcgtgtgcagtctgggcaccaatcagcataaaactttacaatgatttctttatcggattgaatcagttcattaaattgttcgtttgttgtgatttttttcatatgtcacatctccttttcaatgccattttaatataaaataaaaaggaattacatacaaatgcattcaacatcagcatgcccaaaaataattagatcattttccggtgaaaatgataagatagtaaagatgaattgtagtgggggagtatccattgaaaacaagtctaggattagtgtacggaggaaagtcggcagaacataatgtttccctgcagacggctctggctgtaatcaaagcgctaaatactgagaagtttgatatacatccgatttatataacagaaaaaggcgaatgggtaagaggcgctcgtttaactgagcctgtttcaaatgtgaaaatgcttcaatttgagcaaggaggcagtgctttttctccagctgccctgaaccaggagatgtttccgcaggaagcgtcacagcaaaatgaagccatcgacgtcgtattcccgctcctccacggaccgaacggagaagacggtacgatccagggaatgctcgagctgttgaacattccttatgtcggcaacggagtgcttgcttcctcagccggcatggataaagttgtcatgaaacatttatttgctcaggccggccttgctcaggctaaatacgcagctttccttaagaaagactggactcgttctccgaaagaaagctgtgagcaggttgaacaggaattaggctacccttgcttcgtaaaaccggcgaacctcggctcaagtgtcggaatcagcaaatgccgaaaccgtgaagaactgcaaaaagcgtttgagcttgctttccaatatgaccgcaaagtcgtcgtcgaagaaggcattaacggccgcgagatcgaaatcggcgttcttggaaatgacgatcctaaatgctctgttgtgggggaaatcgcaccgaagacggatttctacgattacaaagcgaaatatgaggatggagatactgatctgatgattccggcgattgtgactgatgaggaatacgcaacaatcagtgatatggcgatcaaagcatttaaagcgatcgacggttcaggactcgtcagagcggactttttcctgacagctgacggcgaagttctgatcaatgaagtcaacacaatgcctggctttacacctttcagcatgttcccgctgctctggaaagaagccggagtggaatatgctgacctgattgaacagcttgtggagcttgcaaaagaacgccacgctgaaaaacaattgattaagcatacattctaatgaagaaggacactgccggtaaaagggcagtgttttttcccgtatatacaaaagaaagagagggaccttacttgattaagcgaacagtaaaaaacattgccgaaatggttaatggcacactaacaaatccgcaatatgaacaaacagtcattcatggagtggcaaccgatacaagaaaactggaacaacatcagctcttcattccgctgaaaggggaacgttttgacggccacacttttgtggagcaggcttttgaagctggtgtagcggctgttctttgggatcggtcagaaccaaatccgcccgagaatcacgccgtcattttagtggacgatacccttactgcacttcagcagcttgcaaaagcctatttgcaggagcttggcacgcgtgtcatcggagtaaccggaagcaatggcaaaacgacaacaaaagatatgattcacgccgtattggggacccagtaccgtgtccacaaaactgggggaaacttcaataatcatatcggtttgccgctgacggttttagcgatgcctgaaaatacggagatcgccgtattggagatgggaatgagcgccaaaggagaaattgacctcttgagccgactggcaaacccggatgcggcagtgattacgaatatcggcgaatcgcatatgcaagaccttggctctagagagggcatcgcggaggcgaagcttgaaatcattaacgggcttaaagaagacggagtgctgatttatatcggggacgaaccgcttcttcaaaatgcatacagctgccagacgaaaacgtacggtacgggagcgcataatgattatcagcttcaggatgtcagccagagtgaggaaggaacccattttacaatcaaagggataaaaaacacgttttttattccaatactcggcaagcacaatgtgatgaacgccatggcagcgattgctgcaggagcttattttggcatcacgcctgagggtgcggcaaaaggactgagcggcctaaaggtaaccgggatgagacttgaactcatcaaaacagacagcggcctttcgataatcaatgacgcttataatgcgagcccgacttccatgaaagctgcaattcaattgacagaaagcctcgaaggctacggcaaaaaaatgctcgtgctcggtgatatgcttgaactcggcgatcttgaagaaacgttccataaagagtgcggcgctgtgatcagccctgataaaattgaccgcgtctttacgtacggaaaactgggagcttttatcgcggaaggcgccctgaaacactttgagaaagaccgcgtcagccattacactgagaaaaaagatctcctccaagctgtgaaggaaaacgcatcaaaaggcgatttgattttattcaaagcgtccagaggtatgaagcttgaagaaatcgttaaagatttaatagagagcccgctttcgtaagaaaatattttgcgaaaaaacgcatattgcatcataaaataacatgatgtgcaaacactaatgtatgccggccgaaaattatgtatatctggccggctgcggctatgatacaatatatataggttatttcgcgatacgaacatattcgtccggacttttcatcgtgacccgaagttctccgctggattcttgggagcggatggagcagcagccggcatattcgagatgccgatctgcttctcatcttattgaaaaacaaatagtgtaatggtaagataaaacttaaagtaattcgggctttgtatacggatggatcctgtccttcttgtctaaagggcagttttataagtggtaaatcacgacattactgaaacagcaattagaaggagtttgaataatttgactataacgtttcaagattttaatttaagttctgatctcatgaaagcaattaatcgtatgggatttgaagaagcaacaccgattcaggcacaaacgataccgctcggactttcaaataaagacgtcattggacaagcgcaaacaggtacaggtaaaacagctgcgtttggtataccccttgttgaaaaaattaaccccgagtctcctaatattcaagcaatcgtaatcgcgccaacccgtgaattagccattcaagtatctgaagaattgtataaaatcggacaagataaacgtgcgaaggttcttcctatttacggcggacaggatattggacggcaaatccgggcgttaaagaagaatccgaatattattgtcggaacacctggacgtcttcttgaccacatcaaccgccgcaccattcgtttaaacaatgtaaatactgttgtaatggatgaagcggatgaaatgttgaacatgggattcattgatgatattgaatctatcctttcaaacgtgccaagcgagcatcagacacttctgttctctgccacaatgcctgcgccgatcaaacgcattgcagagcgctttatgactgagccggaacacgtaaaagtaaaagcgaaagaaatgacggtttctaacattcagcagttctatttggaagtgcaagaacgcaaaaaattcgatacactgactcgccttcttgacattcagtctcctgagcttgcgatcgtattcggacgtacaaaacgccgtgtcgatgagctggctgaagccctgaaccttcgcggatatgcagctgaaggtattcacggtgacttaacgcaggcgaaacgtatggttgcgcttcgtaaatttaaagaaggcgcaatcgaagttctagtcgcaactgatgttgccgctcgcggacttgatatctcaggtgttacacacgtatacaacttcgacgtgcctcaagatcctgaaagctacgttcaccgtatcggaagaacgggccgtgcaggaaaaacaggtatggcgatgacgttcattacaccgcgtgagaaaagcatgcttcgcgcaattgaacaaacaacaaaacgcaaaatggaccgcatgaaggagcctacacttgatgaagcgttagaaggccagcagcaggttactgttgaacgtcttcgcacgacaatcagtgaaaacaacctgaacttctacatgacagcggcagctgagctgcttgaagatcatgatgcagtaacagtggttgcggcggctatcaaaatggctacaaaagagccagacgacacaccggttcgcttaacagacgaagcgccgatggtcagcaaacgctacaagaaccagcgctcttctaaacgcagagacggtcaaggcggcggctaccgcggcggaaaagggaaaagcaacaaccgttcttcctatgacaaaaagcgttcaaacgatcgccgttcttcaggtgacagacgccagaaaaaatcttactaatttgatcgattcagagcccaaaacatgatgttttgggcttttttatgttcgcgatttgttattcagcaaattttcagctgacggaagccatttttctctgtatgcttaagaatgaaacctttctgtaaaagagacgtataaataacgacgaaaaaaagggaggtaggtatttttgagagagcagccaaaaaaccaaatcagtccagacggattaaaggtttggcgacttcaagagatcatcatatccgctgtttgcttacttattgtcattgcagttgcagtgttaagctattattttcattggccgtactggatcagcggcgtgctcggcgcggtttggctgttgggatcgattgtgacggtctttatcattccgaaggtccgtcataaggtgtggcgatatgaagtccatgaacatgaaatagatattcagtcaggtatttttgtggtaacacgtgtgattgttccgatggtcagagttcagcacgtcgatacgtcacaagggccattattaaaaaaatacaacctggcaacggtgaaaatttccacggccgcgaccgttcattcgatccccgctttagagatggaggaagcggatcggctgagagactccatttcccgtctggcgagggtgactgacgatgatgtctgaaccgaaacgcctgcacccggcagcagtcattttgaatttatgccataccattattcaaacgataaaaaatatcattctgccattcttttttgtgtatattgtcaattcaaaccatactgtccgtttttacggagccattgcgctcggtgtgctattcatctggcttgtagcggcaagcattatcaaatggagaaggtttacctatcgaattgaagatgatgaatttagaatcgaagaaggcttatttgttacgaaaaagcgatacatatcgattgatcggattcaaacgatgaatacgagcgcaggccttgtccagcaaatctttaagcttgtgaagctgcaaattgaaacagcaggcggaggcaaggaggcagaagccgttctttctgctatttctgttgaagaagcggaacgcatcaaagaagctgtctttaagaaaaaagcgcaaagacgagaaaatgaacttgatgaagaacggcttgaagctgaagaggagttggttccggccgttgaggtgcaagagcactatcgcatgaacgcgaaagaattgctcatggccgcttctacctccggcggaatcggagtcattatctccgctgtatttgcacttatttcccagcttgatgaagtgctgccaatggattggttattcgataagttttccttccttcagcacgccagcatcggtatttacgcggtactgatttttatcggtttatttatcgcctggattttcagcatcgcgggcatgatgtttagatacgcgaactttcaaatcataaaaaaagagcaggaactggtgatttcaaggggaattattgaaaaacatcaagtcacgattccattgcgaaaaatacaagccattaaaatcaaagaaaatatcattcgccagcttttcggctttgtaacggtgtccatcgtcagcgcaggaggcggcgaccgggaaaaagaagaaggcgctttgaccattctctttccaatgattcataaaaaaaagcttccgcacatgctccgaacatttacgccggaatacacgctggaagaaaactgccgccgcctgccgcggcgcgcgttgaaacgctatttgttccgttctgtcattttttcactatttttgatcatcccgttatgtatcttctttcagccatggggctatctgtcagccatcctgctgccgatagaattgttcttcggctatctcgcgtataaagaggctgcatggacgatcaacggggaccgtcttcagctgacgtctagatttataggcagaacaaccgccattgtactgaaaaaacgaatgcaggtctgcaagttcagccaatcctatttccaaaagaaaggccgcttgtataccatttctacttcggtgaaatcatcgagccatatggaagaattaacggtgagggatgtaggtgaagaggatgcagccttcattttaaactggtactcatatgaaaaagcggacggttaataccgccgctcttttttttgcacgcataaaaacgaaagaagaaacccgccgcatagtccaaacagatgggccatcatgttaatattggagttgataaacgacatgagaacggcaaatgcgagcagtgtgatgatcattttggaatgctcctgccctattagttcattgcgaaaaagaaccataaacaggtacacgccgaatagcccgaaaattgcgcctgaagcaccgacatgcacgtaatcaagcggctctgtaacataagtgccgatattgccgatgatgccggagccggcgtatacaagaagaaaacgcgcttttcccagcatgcgttccaaagccggggcaaataaaaagatggacatggaattaaacagcagatgtgtgaaaccggcgtgcagcaaaatcggtgtgatcagccgccaccattcaccgtttgcgacacctagattatagcctgtgacggtatccctccataacacaactgaatgggcaggaagtgaaaaaaacagccagagaacagcttgcaaagccaatataaaggtgacaacggggtaaagcctgataaatgtttgaaaattttcagtccgtataaacattccgagccccttttcttcattttggtatatctatagtaacacgtttatgagacaaaccatttaaatagtacgtacgcaaaggaggttatcatacatgatttacggcattgggctggacattaccgagcttaaacggatcgcctctatggctggacgccagaaaaggtttgccgagcggattttgacgcgaagcgagcttgaccaatactatgagctttcagagaaaagaaaaatcgaatttctcgcgggcagattcgcggcaaaagaagctttctcgaaagcgtttggcaccggcattgggaggcagctcagctttcaggacattgaaattaggaaagaccaaaatggcaagccctatatcatttgcacgaaactgagccaggccgccgttcacgtatcgatcactcatacaaaagaatacgctgccgcgcaggttgtgattgaaaggttgtcaagctagtctgcatattagggaaaccccactcatatatttgatagtgcattaagggagacaagttgtttgaggcttttatggtacgcatctgttctgcctaaacgtgtaccgagcgtaccgttaaagtcaaacaagcgatttcttccttttacatcaattgagaaaaaggggttgaaaaaggtgagaaaaagctttgttttgcttttaacgggactgcttgctgttcttattctttctgcctgcgggcaaaaaacacagcaagatattgtggccgggttagatgaaaaggcgaaagaatacacctcgtacaaagcaaaagcgaaaatgaccatcgagacagggagtgagcctcaagtatacaatgtggaaatctggcacaaaaagccgtctctgtacagggtttatttagaaaatccgaaaaaggaccaaaatcaagtcattttacgaaatgaaaacggagtattcgttctcacgccgtctttaaataagagcttcagatttcaaagcgattggccgaacaacagcagccaggtttatctgtttgaatcgctcgtaaaggatgttcaaaacgattcggatgcagttttcacagcgaaagaaaagaaatacgtattcgaaacaaaaacaaactatcagcataacaaaatgctgccgacgcaagaaatcacatttaacaaaaaagatatgagcccgtcatctgtcaaagtgatggataccgaccggaaagtgatggtcaaagtagaattcagcagctttgaatttaataaacaatttgataaagaatcatttgatgaaaagaaaaatatgaccctttctcaaatggatgtcgccacaagcgcgaagccttccgatacatttgcggtcaaaacgccgctggaactgccgcttggcgtcaagctgcttgaagaaaaagatatatctactgaagacgggaagcgcatcatcatgacgtacggaggagaaaaatcatttacgttaattcaggaaaaagcccagattgccaaggcttcctcctccgttacgctgaacggcgaaccggtaaatctcggctacaccatcggcgccttgtcggatgcatcattgtcatggacatatgaaggcgtagattaccttctctcttctaaagatctttctaaagaggaaatggtgacagtagcaaaaagcatgcagggacaatcatcgaaataacaacaaaggccaaacatgatttggcctttttttcgttagacatcgtttccctttagcctttaattttagtatgatatgtaaatgatattgaataaaagctaggaagtgtcgtaatgagcacaaaacctttttacagagatacgtgggcggaaattgacttgtccgcgataaaggaaaatgtcagcaatatgaaaaaacatatcggtgaacatgtccacctgatggcagttgtgaaagcaaacgcctacgggcatggtgatgcagaaacagcaaaggctgctcttgacgcaggtgcttcatgcttggccgtggctattttggatgaagcgatttcactgcgcaaaaagggcttgaaggcgcctatattggtgcttggcgcggttcccccagagtatgtggcaatcgctgctgagtatgacgtgaccttaacaggttattctgttgaatggcttcaggaggcagcccgccacacgaaaaaaggttctcttcattttcatctgaaggtcgatacggggatgaacaggcttggtgtaaaaacagaggaagaagttcagaacgtgatggccattcttgaccgtaaccctcgtttaaagtgcaaaggggtatttacccattttgcgacagcggatgaaaaagaaagaggctatttcttaatgcagtttgagcgttttaaagagctgattgctccgctgccgttaaagaatctgatggtccactgcgcgaacagcgccgccggactccggctgaaaaaaggcttttttaatgcagtcagattcggcatcggcatgtatggccttcgcccgtctgctgatatttcggacgagataccgtttcagctgcgtccggcatttaccctgcattcgacgctgtcgcatgtcaaactgatcagaaaaggcgagagcgtcagctacggagccgagtacacagcagaaaaagacacatggatcgggacggtgcctgtaggctatgcggacggctggctccgaaaattgaaagggactgacatccttgtgaagggaaaacgcttgaaaattgccggcagaatttgcatggaccaatttatggtggagctggatcaggaatatccgccgggcacaaaagtcacattaataggccggcagggggatgaatatatttccatggatgagattgcaggaaggctcgaaaccattaactatgaggtggcctgtacaataagttcccgtgttccccgtatgtttttggaaaatgggagtataatggaagtaagaaatcctttattgcaggtaaatacaagcaattaacttacctaaatggagaattcataaaacagctttgcttgaagagtgaataatggtatcattatcactggatggataaaagagtcgtatccgtaagtttggtggaggtgtatgttttttgtctgaatccagcgcaagaaccgaaatgaaaatcagcttgcccgaaaacctagtagctgaattggatggtgtagcgatgcgggagaaacgaagcagaaacgaactgatatcacaagcagtgagagcgtatgtcagcgaacgaacaactcgtcacaaccgtgatttgatgagacgcggctatatggaaatggcgaaaatcaacctgaatatttcttctgaggctcactttgcggagtgcgaggctgaaacgacagttgagcgcttagtcagcggaggataatcatttgattgtgaaacgcggcgatgtttattttgctgatttatctcctgttgttggctcagagcaaggcggggtgcgcccggttttagtgatccaaaatgacatcggaaatcgcttcagcccaactgctattgttgcagccataacagcacaaatacagaaagcgaaattaccaacccacgtcgaaatcgatgcaaaacgctacggttttgaaagagattccgttattttgctggagcaaattcggacgattgacaagcaaaggttaacggataagattactcatctggatgatgaaatgatggataaggttgatgaagccttacaaatcagtttggcactcattgatttttagacatatttgcaggttgctcaaatagagcaactttttttgttttcaaaaaacataaacgatataatagtgaaataacgaaaaaatatgttgttttttattgggaggtaagcgaatttgatgtcgaaccagactgtataccagttcattgccgaaaatcaaaatgaactgctccaactgtggactgacacactaaaagaattaagcgagcaagaatcctatcagctgactgaccaagtgtatgaaaatatatctaaagaatatatcgacattctgttgctgtctgttaaggacgaaaatgctgctgaaagccaaatcagcgaactggcgcttcgagcggtccaaatcggactgtctatgaagtttttggctactgcgtttgctgaattctggaagcgtctctacacgaaaatgaatgataagagattgccagatcaagagagcacggaattaatctggcagattgaccgctttttcagcccgattaacacagaaatttttaatcaatactcaatctcatgggaaaaaacagtatctctgcaaaaaatcgcgctgcaagagctgtctgcgccgcttatcccggtgtttgaaaatatcactgtgatgcctcttgtcggaacaattgataccgaacgcgcgaaacgaattatggaaaaccttcttaatggcgtcgtcaaacaccgttcccaagtcgtgctgattgacattacaggtgtccctgtcgtcgatacgatggttgcccatcatattattcaggcatcagaagctgtaaggcttgtcggagcaaaatgcctgctggccggaatccgcccggaaattgctcaaaccatcgtcaatttggggattgatttatcccaagttataactaagaataccctgcaaaaaggaattcaaacagcattggaaatgacggatcgaaaaatcgtttcattgggggaataacattttgagacatccgaaaatcccgatcttgaaactgtataattgcttattagtgtccattcagtgggaacttgatgaccaaacagcattaacctttcaagaagacttattaaataaaatatacgaaacaggtgctaacggagtcgtcattgacctgacatctgtggatatgattgattcatttatcgcgaaagtgctgggcgacgtcattacaatgtctaagttaatgggggctaaagtcgtcttgaccggcattcagcctgctgtggcagtgacgctgattgaacttggaatcgcacttgaggaaatcgaaactgcgctcgacttagagcaggggcttgagacattgaagcgggaattgggggaatagcgaatgaacgaccaatcctgtgtaagaatcatgacagaatgggatattgtggccgccagacagctgggacgaaacgttgcgaaagaactgggtttcggcacggtagaccaggctagaattacaacggctatttcagaattagccaggaatatttatttatatgccggcaaagggcagattggaattgaacaggtcgcagacagaggaaaaaaaggcctgaaaattatagcggaagaccaagggccgggaattcctgatatccgaaaagtcatggaagacgggttttcaacgtctggaggacttggtgcgggacttcccggggtcaaaaggctgatggatgaattcagcttaaattccgtagcgggggaaggaacagagatacaagccatcaaatggcttcggtaggaggtaagaacgtggattttagggaggttattgagcagcggtatcatcagctgcttagtcgatatatagccgaattaacagaaacatctttatatcaagcccaaaaattcagccgaaaaacaatcgagcaccaaattcctccggaagaaatcatcagcgttcacagaaaagtgctgaaggagctgtatccaagtctcccggaagatgtgtttcattcgctggattttttaatagaagtcatgattggctatggaatggcttatcaggagcatcaaacccttagagggatacagcaggaaatcaaatcagaaattgaaatcgcggcaaatgtccagcagacgcttctcggaactaaagttcctcaggaggaagcgctggatatcggcgccatcagtgttcccgctaaacagatgagcggtgattactaccactttgtcaaagacaaggaatccatcaatatcgcaatcgcggacgtgatcggaaaaggcattccagcggctttatgcatgtccatgattaaatacgcaatggactctttgccggaaacgggcatacacccttctcaagtgctgaaaaatttgaatcgtgttgttgaacaaaacgttgatgccagtatgtttattacgatgttttatgcgaattacaatatggacaagcatcaatttacatatgcttcagcgggacatgaaccgggattctattattctcaaaaagacaacacgttttacgatttagaggccaaaggactcgttctcggcatctcgcaggactatgactacaaacaattcgatcagcatctggaaaagggcgatatgattgttttattttctgacggcgtcacagaatgcagaacggaaaacggtttcttggagcgtcctgatctgcagaagctcattgaggaacatatgtgttcctccgcgcaggaaatggtcaaaaacatttatgacagcctcctcaaattgcaggattttcagcttcacgatgattttacgttaattgttttgcggagaaaggtttaacgtctgtcagacgagggtataaagcaactagtgatttgaaggaaaatttgaggtgatacgaatgaatataaatgttgatgtgaagcaaaacgagaatgatatacaagtaaacattgcaggagaaattgatgtatactcagccccggtgcttagagagaagctcgttcctctggcagaacaaggagctgacttaagaatttgcctgaaagatgtcagctacatggacagtaccggattgggcgtttttgtagggacctttaaaatggtgaaaaaacaaggcggttcgctgaaacttgaaaatctttctgaacggctgatccgactgtttgacattacaggcttgaaggacatcattgatatttctgcaaagtcagaaggtggagtgcaatgaagaataatgctgattacatcgaaatgaaagtgccggcccaacctgaatatgtgggaattataagactgacgctgtcaggggtcgcaagcagaatgggctatacgtacgatgaaattgaagacttgaaaatcgcagtcagtgaggcgtgcacaaatgcggttcagcacgcttacaaagaagataaaaatggggaagtgtcaatacgattcggtgtgtttgaagaccgtttagaggttattgtggcggatgaaggagacagctttgactttgatcaaaagcagcaggatctagggccgtacacaccttcgcacacagttgatcaattatcagaaggagggctcggtctatatttaatggaaacgctcatggatgaagtcagagtgcaaaaccactccggcgtcaccgtagcgatgacaaagtatttaaatggggagcgagttgatcatgacacaaccatcaaaaactacgaaactaactaaagatgaagtcgatcggctcataagcgattaccaaacaaagcaagatgaacaagcgcaggaaacgcttgtgcgggtgtatacaaatctggttgacatgcttgcgaaaaaatactcaaaaggcaaaagcttccacgaggatctccgccaggtcggcatgatcgggctgctaggcgcgattaagcgatacgatcctgttgtcggcaaatcgtttgaagcttttgcaatcccgacaatcatcggtgaaattaaacgtttcctcagagataaaacatggagcgttcatgtgccgagacgaattaaagaactcggtccaagaatcaaaatggcggttgatcagctgaccactgaaacacaaagatcgccgaaagtcgaagagattgccgaattcctcgatgtttctgaagaagaggttcttgaaacgatggaaatgggcaaaagctatcaagccttatccgttgaccacagcattgaagcggattcggacggaagcactgtcacgattcttgatatcgtcggatcacaggaggacggatatgagcgggtcaaccagcaattgatgctgcaaagcgtgcttcatgtcctttcagaccgtgagaaacaaatcatagaccttacgtatattcaaaacaaaagccaaaaagaaactggggacattctcggtatatctcaaatgcacgtctcgcgcttgcaacgcaaagctgtgaagaagctcagagaggccttgattgaagatccctcgatggagttaatgtaatgatccaggttgaagaaaacgagcatattcaaactctagtatatcaactgaataaagaagggaaatcgatttgcggtgacagtttttttatgaaagctgatgataaggagttaatttgcgcggttgctgacggactgggaagtggatcacttgctaacgaatcctctgcagccatcaaagacttagtggaaaactatgcgagtgaagacgtagaaagcattatcgaacgctgtaatcaggcgatgaaaaacaaaagaggcgctacagcatctatcctgaaaatcaattttgagcaaaggcagtttacgtactgctctgtcggaaatgtacggtttattctgcattccccgtctggtgaaagcttttatcctctgccgatttcgggctatttatcaggcaagccgcaaaaatacaaaacgcacaccgccacctatgaaaagggttcaaagttcattatacatacagatggactcaacgtacctgatatccgctcccatttaaaaaaaggccaatcggtagaagaaatatcgaattcgctgaaaatgtatacgacatcgagaaaagatgacctgacctatattctcggacagctgtcctagagaataagaacaagaagaagccggaatgccggcttctttttttatgtgtttttttcggtttttgatacactagagacagaacgacaaaattggaggctttggttacatggaaacgtcagcccttttaaaacagcaaattgcgaaagaaataggtttatcacaaaaacacgttgaaagtgtcatccgcctgcttgaggacggcaatacagtcccgtttattgcccggtatcgaaaagagcagacgggttcaatggatgaggttcagattcagacgatttctgaacgctggcaatacatacaaaacctgaatcagcgaaaagaagaagtcatcaggctgatcgcagagcaggataaactgacagatgatctaaaacgtaaaatcgagcaatcggtgaagcttcaggaagtggaagacctttaccgcccttataaacaaaaacgtaaaacaaaggcgacagtcgccaaaagcaaaggccttgagccgcttgccgactatatcctgacacttccccaagatgatcgtctggcagcaactgcagaccaatacatcagcgaagaaaaagaagtgtttacgcgagaagaagcgattgaaggcgccaagcacattattgcggaacaaatttcagacgagccgaccttcagaaagtggattcgccaggaaaccttcaaaagaggaaccattaagtctgcagcaggaaagtcggcagacaccgatgagaaaaatgtgtatgaaatgtattacgagtatgaagagccaattgcaaaagtcgttccgcatagggtgctggcaatgaaccgcggcgaaaaagaagacattttaaaggtagcgattgaaccgcctgcggatcacattaaggcgtatttagaaaaacaagtcatcaaaaatcgctcaacatccgtaagagagattttgcaggagacaattgatgacagctataaaaggctgatccagccggcaatcgagcgtgaaatcaggaaagagctctcagaaaaagctgatgaacaggcgattcatattttctcagagaacttgagaaaacttcttttgcagccgccgatgaaaggcaaaaccgttctcggtgttgacccagcctttcgaaccggctgtaagctcgctgtgtcagatgagactggaaaagtcttgaaaattgatgtgatctatccgcatgcgccagtcaacaaaacaaaagaagcccatgaaaaagtgaaaaagattcttgagcagtatcaagtcgagatggtggcgatcggaaacggcacagcatccagagaaacagaacaattcatcgtcaatgtactgaaagacatgccgcgcaaaatttattatgtgatcgtcaatgaagcgggtgcaagcgtctattcggcttcagagctggcccgagaagaattccctgaccttaaggttgaagagcgcagtgccgtgtctattgcgcgaagacttcaagacccgctcgcggagctcgttaaaatcgatccgaagtctgttggtgtcggacagtatcagcatgacgtcagccaaaaacgcttaaatgaatctctgcggtttgtcgtcgaaacggtcgtaaaccaggtgggagtaaacgtcaacacagcctccgtcgcgctgcttcagtatgtagcgggattatcgaagtctgtagcaggcaacgttgtcaaaaaacgtgaggaaatcggaaagttttcaaatcgaaaagaactgaaggacatcccaaggttaggtgcgaaaacctacgagcaatgtatcggtttcttaagagtgcaggaagggacagagcctttggatagaacaggcatccacccggaaagctataaagaaacaaaagcacttttgaaaaaactcggactttcaacagaacatatcggcacggcggaattgaaggacaaaatcaatcagctggcgctctctgaaacggcaaaagagctgggaatcggcgaaatcactctgaaagacatttgtgaacagctgacaaggccggaacgcgatccgcgcgatgaggtgcctaagcctttgctgaaaacagacgtccttcagctggaagatttgaaagagggaatggaactgcagggcaccgtgcgcaatgtagtggacttcggagcgtttgttgatatcggagtcaaacaagacgggcttgtgcatatctcaaaattgagcaatcaattcgtcaagcatcctcttgatgtcgtatctgtcggcgatattgtgacagtttgggttgacggcgtagatgtacaaaaaggcagagtatcgctgtctatggtaaaataaaagcactgcttacgagcagtgttttttcctatagaaataccagcattgattcagcagtttaatttggtaattatctttttcaaggaacgctttttgcatctgctttttaagccaatttggcataggctcattcctcctcagcttttatcataagagggacggtgattaccatattgtatgcgaacggtgaattgtcccgttcaatgttttttaagtgaggtgcgctatggataatatagagcttcaaaagctgacagaggatatttctaaaacatattttaaaaagccgttccgccatcaggcgctttttaatgacaggcttaaaaccacgggcggaaggtacctgttaacctctcataacattgaattgaacagaaaatatctgattgaacacggcagggaggagctgatcggcatcatcaagcacgagctctgccattatcatctccaccttgaaggaaaagggtacaagcacagagacagagattttagaatgctattgcagcaggtcaacgcgccgaggttctgtacaccccttaagaaaaaagcggaaaacaaaaaaacttatatgtatatctgtacggcctgcggccaacagtatataaagaagcgcgccatgaaccctgacagatacagatgcggaaaatgccgcggaaaaataaaaagaattttttcgtgaaaaaggttgacgaatatggcaagcctatgttacattataaaagtcgtcacgagagataaataaaaacatttacctcttgacactgcaaatcaaggctgatataataagtcttgtctcattattccacagtagctcagtggtagagctatcggctgttaaccgatcggtcgcaggttcgaatcctgcctgtggagccatattggagaagtactcaagtggctgaagaggcgcccctgctaagggtgtaggtcgcgtaagcggcgcgagggttcaaatccctccttctccgccataagatttcgatataagttctcaaccatcggcccgttggtcaagcggttaagacaccgccctttcacggcggtaacacgggttcgaatcccgtacgggtcattccatttcgttgggctatagccaagcggtaaggcaacggactttgactccgtcatgcgttggttcgaatccagctagcccagccattttttattttttgaaatctaatagtaagagccattagctcagttggtagagcatctgacttttaatcagagggtcgaaggttcgagtccttcatggctcaccatttgtatttttgcgggtgtggcggaattggcagacgcgctagacttaggatctagtgtcttacgacgtgggggttcgagtcccttcacccgcactttatttacaaagtgcacgcaaatcggttttactaggttaagagcctactaaaccagcacaaacacaatttaatgatcacgcggtcgtggcggaatggcagacgcgctaggttgagggcctagtgggtgaataacccgtggaggttcaagtcctctcggccgcatcaatgataccaagggtttagagtaccttggtattttttgtatcttttgaacagaaggtattttgtgattaaaactgaccacttacctaaagtaagtggtttgatttgtccgcaaaagtatatagttaaataagataaaaaggacatagtatatcagcatacaaaatatgttatgcctttttttgttttaataacgcatccgttattttcagcgtacaatgttactttattatggaataaaaacaagtgtctgtaagcttgcttccatctgcggataaatcatcatttcttaaagtgccttcgaatacaaacccaagtttttctggaatagcacgacttttaaggtttgttgattcacatcttatttcaattcttctaaatttaatattgtttaacccaaaatcagctaatttttttactgcttctgtcatatatccattcccgccaaatttagtatttacccagtacccaatttcacatttaggaatggtccagtcaatcctctgaaggctagttattccaataaagttattgctagctttatcaaaaataagaaaacgaaaactttccctctttaaaaaatttatatgagcatttcttaaatttatctctgtttcttcaacagtaggaagttcttgagcaaatggcaaccaggcttttaattcattaaaggaacccctaattgcttggtttacaattttcccgtctcctgtttggtgtggtgctcgaaggattagtctttctgtttccaattgtaaaggcacatctaacaataaaggattcatttgatttctcctctcggaattttatattaaagaagcaaagtaatacaaaataaagctttatgacgtgcgcaaatttagttcaatttgcgtttaatcttctaaaagatattttcgtaactgacatcatatacctattgtgagaaagtcgatgataagtatcatgagatggaaggtatgccaataaacggtgaaaatgatcgtcttggcttatcaaagaaaacaccagactatgaagaagcaaaagatgaagagacaaagttaggagtaaaacgtgtgtttactcctcttttttaattcttgggttcattttcctcattctgggtgttcgattgggtgctcttttttcggtgaatttttttcctgtcaacatctccatttgacgtctagctctggccatttcagtaggaagaatgtaaatatattcaagtatcttatttgtaaatttaaataaaggctcaaccatagtactgttaaattctatatcatcaccatgagcagctgcattccctgcctctttaatcatcttagaaagaccgcccattaaaggtggtaaaattttcttttcctctaagtcgttaagttttgcatgaagcgttcttccaatagcccctttatttttacataccatttccaaagttcttctaagagccattaggcacaccatagcatcaattttccttacatttaaagctgactcataagcagatttaatgtttttaggtaagaggtttaaattcacctgttcactatatgggaacaaaacttgaccatctttataaatatcatcaccctcgttgtatacttcttcagtattccaatgagtatgatacagttgaaattcaaaacaaacaggacactcgaacacttcaaatatgtcattaaattgggcttcataagaggttaatggtacaaatgtttttttttcatatctgtttaacaaattcataggtgccttagttccacaatgtgggcaagtgagaattgtattttctgtcattttatctccctcaatagatttttcctcgtattataacactcttgtttaaattgttaaaatttatcactaatgatttaatagttagcaaatttatatgaaatctaaggaaatagaagatctcaataatgcttatgagactataaaagaaattgagaagcaagggcaattaactggcatgttggaatactatttttacttttttaagggtatgtacgagtttaggcgtaaagaattaatttcgtgataagtgcttattgaatagctgaatcaaagttgtcagaagttgaggatgaaatagagaaagcagagttttttttcaaagtgtcctatgtatattattatatgaaacaaacatacttctccatgaattatgcaaatcgtgcactcaaaatatttagagagtatgaagagtatgctgtccagactgtacgttgtcaatttattgtagcaggaaacctaatcgattctttggaatatgaaagagccttggaacaatttttaaactctttggaaattttcaaggaaagtaacattgagcatttaattgcaatgtcacacatgaatattgggatttgttatgatgaattgaaagaatataaaaaggcttcacaacatttaaacttggctttgcaaatttttgaaaaatcaaaacatagttttctaacaaagactttattcactttaacctatgtggaagcaaaacaacaaaattatgacgttgctttgacatactttaggaaaggacgatttattgtcgataaaagtgatgacaaagaatactcagcgaaattcaaaatattagaggggttatttttttcagatggcgagactcaattaataaagaatgcattttcatatctggcttcgagaaaaatgtttgctgatgttgaaaatttttcgattgaagtcgctgattattttcatgaacaaggaaatttaatgctctctaatgaatattatcgtataagtattgaagcaagacgaaaaattaaaaaaggggagatcattaatgaaaatcaaccggattctattggcagcagtgatattaggtagtgttttatcatttggacattttattgatcaggatgttaaggcatcaatacaagtagcttctgatagagttggggcataattagataagaaagagtgaggttgaataatatactcactcttttattgattaaagtaatactcctaataatattatttcccttgatgtgctaaaattaagttatattggtacttttcatcatcattataagcttaaaaaatatggtattaatctaacagtgaaagaggaatgtaaaaatgaaagaggctaatgatcattatcctagttacggggcaaataaatttgtgtgtccaacatgtatggtgtattcacaacaaaagtggtatgagattcaaaaaaatgatatggataacgaattaattctcacagagcatttaagaacaagagggcgtgtgcctgcttatgcaagtccaaataaagaagctagtgttatacatgctatacctcaatttcacaccgataacataactgctctaagtgtgtgtatcagttgtgatcaaccggcttactggattgatggagaattagtttaccctaaaaatccaactgtgaaacctccaaattccgacatgccggaagaagtgaaaaaactttataatgaagcgagagaaataagtgtactatcacctagagcttcggcagcattacttagattagcattagaaaaattattacctttattaggtgcacaagggaagagaataaacgatatgataggtgacctagtacagaagggactttcgccgaaaatacaacaggctttagatagcttacgtgtaattggaaatgaagccgttcacccaggttcaattgatttagatgaagaaaaagaggttgcattagcgctatttaagttaataaatttagttgtagaacaaatgataaccgaaagcgatgaaatagatgagatttatagtctaattcctaaggataaacgagatgggatacaaaatagggatcaaatgaaaacaacaaaataagctaaaaaaatgaacataccacaacgatgttggtatgtttgtttattgaaagaacattcatgaataagttgaggtcataggaaaagtgtttttcttcttaaagaagtgcccattttctgcccagaattaataataaattatcaaaatcagtgtaaataatataactcgatgctatgaataatggcttttgtaaatgaagatatgattttgctaggttgagggactcgaattaaaaaagaagataccaaactatattggtatcttctttttttttgcatcagagttattaaatctttttatattgctgatgttaaattaatgtcccatttttacactaacgatgtgacttatatgataattatatacaaaaatcacttatatctagaaaattaaacaaatttacacaaaaaaggacaaaataatctttacaaattacgacaaatacttgatgttttttgtaatcaacccttattttgtgacaaatatatgaatattttgtcaccctgtaaaatatttatttattatatatatttaattcgagaggaggtcatataaagaacgaatattcgaattagtatgaatttaccgggagatagattcataaaacaattaaataatgggagtgggagtctatgagaaagggctttgtgcctaaagcttacatactgaatcttaggaaaaccctaatgatttttgcagtcttgttattgattgctggcaatgtgttgacagttttgccgaatcatattcatgctgaagataatacagaggtaactcaaagtgcagatactacttgcccagctcctgttgcgttgattaacggaagctttgaacaaggtgctgcaagaggatctgcatatgataaatccggactctattatctcgaatccgaggtacctggctggaaaacgactgatgattcctctggtcagaaggcaattgaaatatggaactatgcacagaatattccggctgttgtgaaaaattggccagcacctccggatggcaatcgctgggctgaattaaacgcttttgaaaatggcatgttgtatcaagacgtgaaaacaacgcctggacaaacgatttattggcgcttatctcatatgggacggcaaggtgttgacaccatgcaggttcgtattggggcagctactagcaatccatacagtacggtggttcaaaaacaattctctgatggaagaactgcatggggaactcatacaggttcttatactgttcaagcaggccaaacgacaacgcgattcggttttgaagctgtaagtacagcgtctggaaatataggagccggcaactttttggatgatattttccttggaacagaaccatgtgtgacggcaaataagtcagtttcaccacagggagaggtacaacccggggatgagcttacatacgcggttcaaatcaaaaatgaaggcggagacgttgctgctgatgcaagcttttcagatgcaattccagagggaactgaatatgttcctggatcattaaaattaattaacggttcgacaacaaagaatttaactgatgcagcagatggtgatgaaggcaattttgatggtaataaagtaaatgttgcattaggagatctacctaacacgaccaacttgcctaatggaatgactgtacagtttaaagtgaaagctaagacaggttatgtcggcaaagaaatttctaacaaagcgcaaataaactatgacagtctattaacgaatgcaagtaaaaaaactgaatcaaacgaagtaacgactccggttgtttttaaagatcctgtacttgaatcaaagaaaacatctgctattaaggcaaaagcggatggaaaccaagacgtggatcacccagaagttggagatacgctttcttacacgattcaaacacgaaatacaattgaagacagtcaggtgaaaaacgttaccatttcagatgcggtgccagaaggcttagaatatgttccgggctctttacaagtagatggcacatcagtcagtgatgctcatgatgatgataaggggcagtatgctgatgggaaagtatcaggacaggttggtaatataagcgataccaaatggcataatgtgacttttgaagcgaaagtgaagtccggtcaagcaggaaaggatattatcaataaggcaagcatttcaggagataatattgaaactccggatacaccgagtaatgaagtcaaagtttatccgaggaatcctgccttagagtctaagaaaacatcagcaattaaggaaaaagtggcaggaaacaagtatccggatcacccggaagtaggagacacgcttctttacacaatccaaacacgaaatactgaagaagacagtgaggctaaaaatcttacgatctcagatgctctaccaaaaggactggaatatgttccaggcactctgaaagtagacggtacagcagtcagtgacgccaaagacgatgacaaaggtgatgtgacagacggtaaagtgtcaggccaaattggtgatgtgactgatactgaatggcataatgtgacctttgaagcgaaagtaaaggccggacaagctggtgaaacaattcaaaatacggctagcgttactggaagcaacgtcgacacaccagataagccgagcaatgataccgagatttatccaagaaagccaaatgtagaatcgaagaaaactgcaagcctacaggaaaaagcagagggcaataaagatgagaaacatccagaagtaggagatacacttctttatacaatcgaaacgagaaacacaattgaagacagtctgctgaaagatctcgtcatttcagatgaacttccggacggattagaatacgtttcgggctcactcaaagtagacaataaaggagtcagtgacgccaaagacgacgataaaggtgatgtgacagatggcaaagtgtcaggtcaaattggtgatgtgactgacacagaatggcatactgttacctttgaagcgaaagtgaaagctggccaagctggtgaaacaattcaaaatacggctagcgttactggaagcaacgtcgacaccccggatactccaaaaaatgaagttgaagtttatccgaggaatcctgccttagagtcaaagaaaactgcaagtattcaagcaaaagcagagggcaataaagaagagaatcagacacaagtgggagatacacttctttatacgatccagacaagaaacacaattgaggatagtctggtgaaaaatcttgtcatctcagatgaacttccagaaggcctagagtatgtttctggaacgctaaaagtagacaataaagccgtcagcgacgcccaagatgatgataaaggcgctatgacagacggcaaagtatcgggtcaaattggtgatgtgactgatacagaatggcatactgtaacctttgaagtgaaagtgaaagctggccaaagagatcagaaaattgtgaataccgccagcgtcacaggtgacaatgttgataaaccagatacaccaagccatgaggtcaaagtttacccgaaaaatccagtcttagagtcagagaagacagcaaagaatctggattccgataaagagaagtatgaagcaggagatacgattgtttacacgatcaaaacaagaaatacagtagcagacagtaaagtaactgatctcgtcatctcagataaactgccggaaggcttagaatatgttccaggcacactcaaagtagacaataaagaagtcagtgatgcccgagatgatgataaaggcgatgtgacagacggcaaagtatcaggccagtttggcgatgtgactgatacagaatggcatactgttacatttgaagcgaaagtaaaagctggtcaagcagacaaaaaaattgtcaatacggcgagcattagcggtgataatactgataaaccggatacaccaagccaagaggtcaaggtttctccgaaagatccagttctgaagtcggaaaagtcagtaaaaaatctcgattcagataaagggaaatatgaagcgggagatacagttgtttacacgattaaaacaagaaatacagtagctgatagtaaagtaactgatcttgtcatctcagataaacttccagccggattgaagtatgtcgaaggcagcttgaaagcgagcaacggtggagaagcaaccatcaaggacggcaaaatcacagctaactttggtgacgtgactgataccgagtggcgtagtgtgacattccaagcgaaaattgagtccggatatgcggaaaaaacaattaaaaacgtggcaaccgttgacggcggcaatatcgacacaccagatacaccgggaacagacatgaaagttgatcctaaggaaccaaaactagaatcaaagaaaacagcctccattaaggaaaaagctgatggaaataaagatgaggaccatccggaatctggcgacacgcttctttacacaatccaaacccggaacacggttgatgacagccttgtcaaagatcttgtcatctcggattctcttccggaaggattagaatatgttacaggaacattgaaagtggatggtacagcagtaagtgatgatcaagacgatgatcatggatattatgccgatggtaagacgtcaggagagtttggcaatgtgaccgatacgaaatggcactctgtaacatttgaagcaaaactgaagtctggtcaagcaggtaaagatatcgtcaacactgcaaacatcagcagtgacaatatcaagacccctgacaaaccgagccatgaagtgaaggtatatccgcgaaatcctgttttagaatctgaaaaaacagtgaagaacttggattcagataaggaaaagtatgaagcaggggatacggtagtctacaccattaaaacccgaaatacagtatccgacggtaaagtagaaaacctggtgatttcagatgatcttccagccggattgaagtatgtcgaaggcagcttgaaagcgagcaacggcggagaagcaacaatcaaggatggcaagattactgctaactttggtgatgtcactgatactgagtggcatactgtgacattccaagcgaaaattgagtctggatatgaaggcaaaaccattacaaacgtggcaactgtaaatggcagcagtattgataagcctgataaaccgaaagcagagatgaatgttgtatcgaaaggttccgagaaaccaaatgaacctgctaagccaagcaaaccaacgtcagagccaagcaaaccaacacccgaaaaaacagatggaaagacaaatacaggaaaagaacttccaaatacagcaacaaatacgtataatctgatccttgttggtttggtattgttagtagcaggaactgcactttggtactttagaagaaaaagaaatgcctgatgttgcatgaagaaatatcttcctatattcatcattattgccggactcgtttttacaggttacggagtctggaaagtgatggacatcagtcataaaacagaacaaactttagatgaggcaaaacttgcattaaagagtccttctggaaaaaatgaaggctcagataaagaaggatttaagcctaagttcggagaggcagttggcattctggagattcctaaaattaacgcagagcttccgatagtagagggaaccgatgcggatgatctggaaaaaggagtcggccattacaaaggaagctattatccagatgaaaacggacaaattgttctatcaggccatcgggataccgtcttccgccgaacaggagaactaaaaaaaggtgatcaattaaaggtgaagctgccatatggaagtttttcatatgagatagacaaaacaaagattgtagaccaaaaagatacgtctattattacgctgcagcataacaaagaggagctaattctaacaacttgttacccattttcatatatcggtaatgcaccaaagcggtatattatttatggaaaacggatttgagaaatccagaatatcaaagattaggctgacgaattttcgtcagcttttttaatcatgttctttctgcattctggttcatgttaaatcatagtaatctaggttaatataaaagtattttgtatatttttataagtttactttacttttttataaggtgagtttataatttggttcaagaggtgatggtcatgaagaaagattttggtgattcgatctcaaataaggtttatgaatatcgtgtacttgccagattgtctcagcaagaattagcaaagaaagtcggggtttccaaacaaaccatctttgtaatggagaaaggaaattatgttccgactctgctgttagcttttcgaattgccgaattttttaatgtggatgtaaacgagatttttacttatgagaaaggaaatgatcaaaaatgaaaatgaattcgatcacagatacgatcaccaacgcaattttttcccctttaaagtcctgggctgaacattctccgggaaattggaatattcttattggcagtgggtttgtattgcttgtagtcggattgattctgacattcgtatttactaaaaaaatgggtaagactgacgaaagaacaaaccaaatcgctttaaatggtagcctctgtacgttatgtgcactaattttttgcgacttgcttttcccaaaagaatatatgtggcaagttttcttcttatttaagtattctattgcattcttcgcttcagcaatctatctagccgttcgatataaaaaagattttttgtaaattcaattaccgagaaagatagtgtctctgtagttgtaattgttttaggagagggaacgaatatgaaatcatttaataatgaaatttggagatgtgggaaagtatgggggttttttgctcgccaattattaaccacaattcatacaaaccgttagagatgatgtaaaatgtaatgaaaataagctttcataaccagtgctatggattgactatgttgagggcctagtggggtgaataacccgtaaaggttcaagttctctcggccgcacccccaataataccaagggtttaaccatctttggcgttattcttttgcggaaaatacggcaacaaatgtaccgcattgtggagtccactaaaaaagtgctgacctctgcacaacatcgttgcgcgagtctgcacttttattctgcgattatggggagtttattttaatccgttgttagccgcgccgatacttggcttttagaagctttttttaagtggctaaaaccaacaaattttttgccttcttcatcccataggcggaactttaacgatttaaggcttgttgccagtgtaatggtcggaacgttttgcaatggtttagtgttgttatgcactttttcaagcttatagtttgggactctcgggcttaaatgatgaacatgatgaaaaccgatattgcctgttagccactgcatgacttttggaagcttataaaaagagcttccttcaactgctgcttttacatattcccaatgctcatcttcttcaaaataagaatcctcaaacgtatgctgaatataaaacatccaaattccgagagagcctgatatcataaaaatcggcacctgaaccagcaggaagttttgccagccaatagcccaacataaaagtgctgccaaagcgacgatccccaggttcgttacatacgtattcatccgttctttgcgttttgccccttttcgattaaaacgattggcaatcccgaaaacgtaaatcggcccaataataaacataacaaacggatttctgtacaatcggtacattatttttgtcttagttgaggctttcttatattcctcaaccgtcagtacccaaatatcgcctgtaccgcgtttgtccagattgctgcttgtcgcatgatggacagaatggtcgtgtgcccaatgatcaaaaggatgcagagtcagaattcctgttaatgttccaaggattcgattcgcctttctgttcttaaaaaaggaatagtggcagcaatcatgaaagatgatgaaggttctcactaaaaaacctgccgcaacaacagaaatcgctaatgtaaggaaataagaaatcgacaagctcttatatgccaaacaccataataggaaaaatggtaccaatgtgttaatgatttgacaaatgcttttgtgtaaatcggacttttcataaggtgtaaccagttttctcaaagtccttaggttttgttctttcatattaaaaagtttccccttccctggtgatcttctaagtgtagaaaacgttttatagccttagaaggcccaacgtgatacaccccatatatgataagtatccttcccgattcatctgtgaaattattggaaatgataaactgatttccagtttattattagcagagtcagccgggatacaaaaggcgtatgaagattatacccagcactttattgggtcaaactctctcaatgctcccccatggggatcgatttatttgaccgtgaacattgattgtttgaggaaaaaaggaatgaagtaatgggtatatccatgagtgactgtttggaaacatctgcagaaacaaagttttacaagtgaacagccttgtttttaaaagattatcttgctctttaacaagaaacagctgagctaagtactattaagcaaagaaaaaggtttgaagacactcgtgattcatttttcatggtgttttcaaaccaaagtttttaataggcctcttattctgcactggtatacacatgtttaacaaataatgccatgaataaatcggaaatataatttgcagttatttccgattcctgatataataaagaagaattatttttgttcggtgtaaaggatagtatgaagattgacttttcgtcttgatgatactttgggcaaggatagtatatactgtgtggttacacactaggaggcaacaaaaatggaacaaggtacagttaaatggtttaatgcagaaaaaggttttggttttatcgaacgcgaaaatggagacgatgtattcgtacacttttctgcaatccaaagtgacggattcaaatctttagacgaaggtcaaaaagtatcgttcgacgttgagcaaggtgctcgtggagctcaagctgctaacgttcaaaaagcttaatcttcaatcgtttatacaaacaggctctttatatagggcctgtttttttatgtctatatcatactcaataaaaaaccctactcaacgttcgagtagggagatgctacaaggtatagaaaaagatttaaaacttcaaaggtttgtttacagtataacatactggattgacaatatgcggaatgtatataaattatttaatgttttgttcaaatataactctttcttttttcacgttcgttactttaagtaagattagatgaattataaaaatggtttcatctaaatgttatcaactcgcatatctcttttatgagaagaagataaacaattattattcaatgtggcagtggatataagaaattcttaaaaataatgaggagatcgattgtttttttctcctggaaataatcacttagagatacctaaaacaatgaaagccctacctctcttccatccttacggctccttgtccgtgccagtgtgaatcaggatactaaaaaaagtgactattttattgagttttttggtaaaacttcaatcttcgcagaagaaatgtaaataataaaaatggattagaatgtaggaataacaaaagaggtcgttaatgttctaaacataagttggagaagatttgcttttcatcataatattccgaaatatcttttgggatgtatctaaccaaaactttttatttgtttttcagtgattcctttaattacttccagttcactaatcaaaaattcatatgcattatccagcatttttttttcgcttgcattaagtgctttttctttcttcatacgcattaaatcacgtacaacttcagcaccttcttgtatttcacctgtttttattttgtccgtgtttattttgtacctttgcttccatggcagtaacctatcggattctccatgctgaaaaatgtgcataatgtgttttaatgcaagtatatcggtaactggtcgtatattcgaactcaatattttactcgttggaatcataactgtcatattactgattgacattcttatgacataatactgttgtttttcctctaagaattctttttcttctatggcttcaattatacctgctccgtgcattggataaacaatgttatcgccaatttgaaacatatcatccacctccatatatggtatccttcttaagattaccatatatggaggtgtaatatcaaaattttaataataacatgatcgaatttttgatgtcaataacttttttgaaaaaacagatcaagcaaaaacaatagggaacgtgtcggatttccaatcaggaaaaggtcaattgatccgtgtgagcagtttttcattggctcaatgacatcacagaaatgatttgagtagaaataagaaggaacgatatttgtgaaatgtcagctaaaaatattaaaagtacatgattaagttctaatttctttaccgatttgatatggataacggcccacttacttaatgatgcattttcacttatcttgcgaacagaaaaaggtttgtggatattgaacattttgccaccgagattggcattattatcatggaaattgacaaccttcaaatgggtattgaggtgaaaagaaaaataaagaaaggagagattataaatgaagaccagaacataaagaagtgaaggggaaagaacaaggttaattgaaaagcaaactatataaaatagtttgcttttctttttgttatgaattcacttctttttctttctctttaatgactaataaaacaccgctcagaattaaaaacgaacctatccaaaatgtcccgcctatttgttctccaagcagaatccatccgagtaaggttccaaccagaggctgaaaaaagaaaaagaggcctccacttgaggcatttaataattgtaagcctcggttccacaataaaaaagcacaagcggttgaaacaattcccaaatacaaaagaccacctagaattttagggtcaagcagttgtgatgtaaaaatggtgctaggttttacaaaaggagttagcgccacaatggcaacaaaagttgaatatgttgtaacaagtattggtgaataactgcttggaacgcgtttgatcagcactgacataagtgcccatgtaagggctgcaacaagcagagaaataccgccaagctgatgagatgtatcaatatgtccgtttcccacaataaagaatacacctatggtcgctaaaataattgaggttccttttttgatagtcaatggttctttaagtaatagacgagcaaaaataaccatgaacgctggtgtggaggacgtaataattgctcccatttgtgctgaagacaacatcgttccatattcttgtgtaacaattgaaatggtgttgccaacaattccaatggccacaattaataaaagatcgcgcttatgaattttccaagattgtttccttattaaaccaacaataagaagcgcaaggatggcgatgacatacctggtccaaaccaattcaaaaggcggaatcactgcgacaacaaccttaaccacaacatacatgccaccccagatactagcggctaaagctaaatatatagaacctaacagggtatttttcatttttttgttccctccgtatttaaaattaggtcaataaatgccctaacggagagaagtagtcactttactccattaagggcggagaagtgctactggaacatcattttcaaatagtggagctaaaaacatgttatgatcacctcgatttttaagaatgactatcattatacaatgttggttataaagccgtaaacaccttaaggggactccatttattaatagaataaactttatgaattcatttttttgtatgataatggcgtcatattcatcgcttgttgaaatttacttatgaaataactggtactgttaaatccaacttgataagacacttctgtcacattggattcagggtgttgcagtaataataagcttttttgaattctataatccattacataacgtaatggcgtcttattcagcattcgtttaaaataacggcagcactcagaacggctcagttggccagcttttgcaatgtcctctaatgtgattttttcagcataatggagatggatccagtttaacatttgtttcattcgatgactttttatcatttcagattgatcgtactctaattgaaaaccattaacgaccatgtttttccacattaacgttaattgcatcgtaatgtcaatctcatagagcgatgtcttttgttgaatcaattgatttatttttttaacagcatctagaatattttttgcccactgttgatttccatccaaaaataaatagggcaaattggttgaaaacatatagggctgaacatagcttgaatacagttcctgagataaaacgaaatggggtgacacatttaaacaaatatacgtacaatccgagccttccttttcttctgccatgtgcaggcagccgctattgataaataatccatccccttcgtgaacctctattttttcttcatttatttgaaagagagctattccttttagtatcaaaacaaattggatttcatcatgccaatgaagcggaatatagccatttatattttgattgatccttgtcttgtaacaggcaactggtaattctaccgttcggtgctctgttaattcttttaaattttgatcgatcacaaaattcttcattctgacttctcacctcaatatatttatattttttcattcgatttgagtattttttatcctattttgcatttattataacactattattatatttattagtgaggagtcatgtatgaatacttccaatagaagaatgggattgttctatgttataacaggggcgacatgttggggaattggaggcacagtagccaaaaaactttttcaagaatatcaaatcgatgtcaattggcttgtaacgacacgcttgcttacggctggaatgttacttttaatgctgcaactgttcagaaaggaccggtctcaggttattgaggtttggaaaaacaaagcgtcggctggccagcttctaatttttggcctattgggaatgcttgctgtgcagtacacatatatggcatccattcaacatgggaatgctgccgttgctacattattgcaatatttatccccagtaatcgtcattatctacacgcttttgcgaaaacaaacggttcttaccaaacaagatatcattactgttgtacttgctttagtgggttgcttttttttgttaacaaatggttcaatatctcaactttcagtgccggcagctgcagtagtatggggagttttatcaggattcgcggcagctttttatactttatatgccgttggtttattaaataaatttgattctcttgtcgttgtaggttgggctatgattattggcggttttgcattgggttttatccatccgccatggcaactggattttcaacgattaactgctgaggcgtatgcatatattttatttgtgatattatttggaacaatgattgcgttctggttcttcataaaaagcttggaaagcctttctcccaaagaaacaagcctattaggcagtttagaacctctatcagctgttgtaacaactgtcgtttggttaaaagcgccatttggttcttttcaatggattggtgctatttgtattatagggataactttaatattggctttacataaagagccttctatggagagtgaaaaatcgatattaaagattaggaatcatgcaaatcgggatatataggggctttttttgcttacatgaccggtccgacaatgaaaaacactggtggagtttgagccctctcggcaatatcaaaaagaccaagggttttgacgcccttggtattttttcttcaagaaccttcaatttttcttttttgtaattggtatccaaatttcacttttaaaagatggtgatgttacatccttatgctcgttccacaatatttctggaccttctatttgttcgtaatttgacgatggaaaccattcggaataaatacgtccccatacttcttgcagtgtatccggaaatggcccgattgattcgaatacagcccacgttgaggcaggaacttcaagccgtgagaaattatctggacactgtttcgttgtggctgcgccaatatagtgatcaagctctcctttttcctctgcccgaccttcagaaaaattggtggatgcactaatgagtcctgatggtgctacattagaaagctcttttagtttatttattgctttttcatctaaactttcccacatagatgcaatttccggattaattcctttgaaaataatatgaactctttttttaatgccaacgatgcgaaatgcctctttttcttcaatacggtagttcatttcatttcctcctttaattgttagctggaaggtcattcgtggataagctttaagggaatggccattaagtctggcttttgatgggtttatgccatgtaaattttggaatgcccgtgcaaaagaatcaggtgagttataaccgtactttattgcaatatcaatcacttttacattgctgtctttcagttcaaaagctgcaagagtaagacgtctgcgacgaatatattccgataatgaaatacctgcaaggaaggaaaacatccttttaaaatgatattcagagcagaaagcaagctttgctgcctcttgaaaatcaatatcattagtgaggttttcttcaatatactttaacgccctattcatacttttaagcaaatccatttatttggcctcctttaaccaaagaataacaggagtgaaatgtatatatccgacattctgtgcacagttttgcaggatgacttagatgaaataaagtaagtgattcacttgtatttgtacaggttttattgaagcatgctgttcataaaaaggcatcaataaaagaaagttataattgtcttataaacggcacattcatataattgagtgaaaaaggatgcgtatcatgcctatcaattcttttgaaaactatccgatgagctggaagccatcgattgataaagctgaaaagcctatttataaagcacttgcagggcaattggaacaggatattttaaacggagttttattacctggaacaaaacttcctccgcagcgagaattggctgattatttagatttaaatgtgagtacgatttccaaagcatttaaagtgtgtgagttaaaggggctgctgagtgcgactgtagggagcggcacatttgtatcgtatgatgcgttgtcgaatgcgtatttacttgaggatacaaagccgacacatttaattgaaatgggagcaatacttccagatcacgcttcatatgagcccttgttacaccaactgaaaaacatgattcaggaggaggattatgaaaaatggtttagctacggccgggcaggcgaaagcctttggcaaaaagatgcagctgtaaagctcatccaaagaggcggatttgaaacatccgttgatcacattttatttgcaaatggagggcaaaatgcgattgctgcgacattggcgagtctttgtaagcctggagaccgcatcggtgttgaccatcatacgtaccctggattaaaaactgttgcatcattgcttagtgtgcaaatcgtaccgataaaatcagaaaacgatgaaatgagtccggagtcacttgaatatgcgtgtaaaaacgaaaatattaaaggtttgtatttaatcccggattatcataatccgacgacttcctttatgtctgttgagaatcgaagaatggttgcagacattgcaaagaaatataatctatttgttattgaggatgcatcgtaccatcttctcaacaaaaatccgcttccggcactcgcctcattcgcaccgcaacaggttattcatattgcaagtttatcaaaatcgttagcgccaggcctgcgtttggcttatgtagcagtgccgagacaatataaggagccaatatcaaaggcgctttataatttaaatataaccgtttccccgctattagctgaacttactgctcgcacgattgtatcaaatcaatttgaagtcttaattgagagtcatcgtgaacaaaccattcgcagaaatcaactcgtaaaccgatatgttgcgggatatacatgtttaggtgttgaaacaggcatttttcgttggttgttgttaccgggtaaaatgtctggtgccgaatttgaagaattggctgctcgacatggcgtgcaagtgtatgcggctgaacgctttgtagtgggaaatagttgtcctgaaagggctgtaagggtttctgtctgtgcaccaaaaacacttgaagagcttgaacaaggattaatgatcctgagacgtttgctagacgatcttacctaatattgtttgccatacaattatgacattgtatggcttttttgtgcgtgttatgatgatccacatctagagggaggtttatacaaaattggcttttagaaaggaaggtcagatgatgttagacaaggacagcgtaaaagcaatagatgttcaaactgcttcattacaaagctacatcagttcaccagaaaaacaaaaatcgttatacaagcgtacactattcgttgtgagtatctcacaaatttttggcggtgcggggctggcggcaggagtgactgtcggtgcgcttattgcacagcaaatgcttggcactgatgcgtttgctggtctgccttctgcgttatttactttagggtcagcaggatctgcattaattgttggaagactttctcaacgttatggccgtcgaacaggtctttcggctggctttatgattggcggacttggagcaataggcgttattatggcagcaatcataaatagtattttcttgttatttatttcgttgcttatttacggtgcaggtacagccactaatttacaggcccgttatgctggtacagacttagcaaatcataagcagcgagcgactgctgttagtattacgatggtttttactacatttggcgcagtggcaggtccaagcttagtgaatgtgatgggggatttcgctctttctattggtgttccatcacttgctggccctttcattttagccgcagcagcatatattttagcaggtgtggtccttttcattatgcttcgtccagatccattagttatagcaagaacaatagaagcggcaaatgaagagcctggtgataaaggacatttggcggcaactgagcatacagaaaacaaaaaagggataatcgttggggcaacagttatggttcttacccaaatagtaatggtagctattatgacaatgacaccggttcatatgagacatcatgggcatgacttgggggcagtagggcttgttattggttttcatataggtgctatgtatctcccttcactggttacaggtgttcttgtagataggttgggacgtaccgcaatggctatttcctctggaacaacgttgcttttggcaggtgtaatagcagcatttgctccgggagattctatggttcttctcgtcattgctctttctttactcggattagggtggaattttggtttgataagcgggactgcccttattgtagattcaactgatagtgccacacgagctaaaacgcaggggacagtggatgttctgattgcgttgtcaggagctgctggcggagcattatctggaatgattgtggcagggtcaagttacctggcattatcatttactggagggatgttgtccttattactcattccagtggtggtatggtttaggggacgataaaggataggattgtttaatttacattaatttgttatattgttagataaagtctattgcgtcgtctaataatctaactaactatagttgctccattaaatctaaatcagcaattttggtataaagatttgtgaccaggattccttatagctgtgtcactcactgcatattctttaattgaatcacataaaatggttatcggatttgaaaaaggcaggattactcgctttaggtaaaggagtcatcacgttgttaaaaaggttttctcttgtttttgttacactaatgatgtctatcgttgttgttttagcggccgctaaagagtcgcctggagattatgtcatctcatttgatgaacctattatcttgatgatctcaattggaatcgttgtatttttatttatccctccattagtcatgtccttttttggcaatttggttgtaagaataatatctggtgtataccaatgttttatcgttttcacttttctggggctcattccaattggatttcttattcccaatggctttttgacaattctagtttctattgcaggaactttagtcagtatagctagtgttgccgtaaccttatgcattggcaagaataaaaaagatatataataattgaattgttattttttcagattgtcagtgaaatagtaaaacaagatgagaaggctttgtgggccttcttttttttgttgttgcatcatccccactttaagcttaatctattgaataataagagaaggaacctatagaagaataaaataaataacgagatgtcaaaaataaaactggacttcattattatcaattcacgtaaatgtaaaaagcttggaaagaggggaattctttcatgacaaatagcagaacgaatccgaaggttgatgaatttttaagtaaagcgaaaaagtggaaggaagaatttgagaagttgagaaccatcattcttgactgtgagctgactgaagattttaagtggatgcatccttgttacacatacaataataaaaatgtcgttttaatacatgggtttaaagaatattgtgcgcttctgtttcacaaaggcgccttattacaggataccgatggaattctcattcaacaaacggagaatgtacaggcggcgcgccagattcggtttacaaatgttcaggaaataaatgagctagaaaacattttgaaagcctatattcacgaagccattgaagttgaaaaagccggtttgaaagtggaagttaacaaaaatattgaattgaacattcctgaagaacttcaaaataaattcgatgaaatccctgcattgaaaattgcttttgaagctttgaccccgggacggcaaagagcgtacactctttatttttctcaagccaaacaatccaaaacccgagaatcgagagtcgaaaaatatgtgcaaaaaattctcgatggaaagggattaaaggattaggcacgccaaggttcaggctaaaggaatatcatcatagcgtaataagatcctttctatagaagaaaaacaagcatagtaagatgcttgtttttttcttaggacaacattcacttactgctgaaatgcttctaacattgtatgccactagacagcgttataaaatattaatgcaacacctagaaatagctcaatggtacggctcatcacatttagaatgcctaggagaactaatagaaccggaagatttttagcaagttactacactccaaactttgtttttgtattaatataccttattaaccattgtttttagtcaggtgcagacaaacgaatactgattaatgaatcatcatgatatcaatgagccgtttgattttttcatcgtcgcctgtatcaacgtacactgtttttctgttttttatgatactctcagtcacttccctcatgacgcctttttctatatcatcagcggaatcccagcgtaaaggcacattatatacatgaattgtgccatccccattgccatgataagtgactgatccatccactaaacgagaacctgccaactgggtcacattttctggatagctggcacttgtatcatcattaggattaattggctcgccagccgaaatatgtcgaacattcaattcatctatctcttgattaggtccaagttgaagccaaactctggcatattcaattttttccgaagagtatgctgccaatacattgtcttctttgcttttctcctctgctgaagaggtatcatttgcagcttttgttgcggattcttctgattctgttattggctccgcttcatccttgcgtattttggtgctgtcttcagtctcagtgtgtttttcgtcagtttgtacagcagaagcttgatttgaaggttgttgtgcttcttcatccttactgcccgtacatccagcaagcaaaatcatgagcagcagggcagtattgcaatagcatatcattctgcatttcttcattttttcattcctctccattaactcaggtcagcttcatatataagtttatgtatctaaatattaccatggaatagataggatgatgttgaaaactgtttaagaagaggaaacgatcttgaatagcatcgcgaaaacttaagaattcttaagaagttttgcccctttttcttcaggttttgaatgtaaagtgggatataaatgcaaaacaaatggagagattagatatgaaacgtctgttattcttatttcagtatatagtgaatccgagaactgttggtgcgatccttcctagttcaaggtatcttggagataaaatggtggatggaattgatttcaagaaggctgcatacattgtcgaatacggtccgggtacgggtgtattcacaaaaaaactgcttgaaaaaagaagacctgaaacgactattttattagtggagcaaaatgaagaattttatttactattgaaagagacatttaaagacgaaaagaatgtatttattgtaaatggatctgctgaaaatagcagccagtatgcaaagaattatggtatgccttatatagactatgtgatttctggccttccctttgcaagcttgccaaaaactgtttcagccaacattttattagataccgcaaagattttaaaaagagatggtgaattcattacttttcaatacactatgttgaaaaaaccgttttttgaacagttttttaccaaaatagatgtaaaaagagagcttagaaatgtaccgccggcttatgtctttagctgctcgatgccgcaaaatgatttggaggaattatatggagtcgaacgttcttattgttgatgatgacaaagacattagaaatctcatctctgtttatttagaaaatgaaggcctgtacactcaaaaggctaaagacgcaatcgaagctttaaacctgctggaacaaaaagaatttgacctgatgattttggatattatgatgcccaacatggatggtattgaagcatgtatgaagattaggcaagaacgaaatctgcctattatcatgctttctgcaaaatctgaggatatggataaaattcagggacttgccgctggtgccgatgattatttatcaaaaccgtttaacccattagaattaatcgctagggttaaatctcagttaagaagatataaaaaatacaatactgatacaagcagcacgaagaacatcattgaaattggtgacttgaccgtaaatacagatacacggcaagtatgggtgcggggccgggaagtcaggctgaccccaaaagaatttgatatactcgaacttctttgcatgaacaaaggaatggttctgagtgtggagaagatatatgaagcagtatggaaggaagacttttttaagtcggacaacactgtcatggtccacattacaaaaatcagagataaaatagaagaggattccaaacatcctatttacatcaaaactgtttggggaacgggatataaaatatgagaaagtttggaaataagctggttgcaaagcttcttggcgcgattgcaattagttttcttgtttcattgggtatgatggcactcattatattatcgaacgtctatctacaaaagatgaattatctcaaagagtttagcatccggagcagctattttatgatactgcttcagttttcggcagctattcttacttttattgcagttttttttatcatggcacggaaaaaaatattatatttgaagcttattactgagagtgttcatcatattgctaatgggaaattaggcttgaccattaggattgaaagtagggatgaattgacccagcttgcccaaaacattaatgatatgtccaaagagttagaaaaaaagtttgaacacgaaagacaattagaaaggtcgaaaagtgaactgatttcaaatgtatcccatgatttaagaacaccattaacatcaattatcggatatttggatttattaaaaaaagggcaatacgacagtaaagcgcaatttcaggaatatcttcaaacgattgattcgaaatcgcaaagactgaaatacctgattgatgagctgtttgagtatacgcatttatcgagcccggacgttaagttaacctgtaaaaaagctgatttgtcaggtttattggaacaaataataggagaatacattcctatttttgaaaaggaacgactaagtgttcaaaaatcaattgcagaagacaatgtacctgttgtaatggatatagaaaagatggttcgcgtttatgataatctctttatgaatgcgataaaatacagcaggaaaccatctgaattattcataagccttgagatcattggtgacaaagcacttttgaaaatttctaatcaagttgagggttttccggctgacaatatagacaaattgtttgaacggtttttcaggggtgataaggcaagaacagatcaacaaggaagcggccttgggctagccatttcaaaaagaattgttgagcttcataatggtaatatccatgcggattatagagagggctggatgagctttattgtcgaacacccattgtgtatataaaagcttatggaggaaagtttccataagcttttttctttagaataaaacttaagaaaccttaagaattttacggagagtttcttcattcttattgcttatcatgtaggtatggaaagtgaggagagtgtagaaattgaaaagtaaatttcttattatagctttgtggtttttagccatttatatagcaaaggaatatcatttactgtcactcgatatggatgatttacaggaatttatatcgttgaacacaaaatacgcaatgctgctgtttattgcgctctggatcattagacttctcttttttattccaggtgtgactctcatgtttttgggggagtatgctttgatccggttgtgagctttatattgtcgatggctggcatttttttgagcgaaaccttggtttacgttttttcaagaatgttttcaagcgggaacatgatgaaggatttagaacgtaaatatccagagttgaaaaaattattggagacttacaattataagtttttggcgctggggatgatttgtccaatagctccaacagatgtcgtttgttttttatcggcagctgtaggaatcaagtataccacttacattttaacggttatcgttacgaatatccctttattgatattttcgagtttcattgtgatcaattttagtgagtcattaatgggaactgtattggttgtcgcatcatttgttttggtttctattgtatccattaaaatgtggaacacccttaagcataaacggagcacatagaaatgccacgagactaaccatttatagcttataagcacctgtagagatttaagttctttcggtatccaatagtaccaagggttaacagcccttggtattattttctgctgcacatatataaaccctccattttcgcttgtagatccttttttatttttgtattttaggttgaatgatcaccagaagaaaaatgaacgcatgatctgaaaagctgttttgccgcaaaataaataacaccccgatgatcaacgataacaatcccgctactacgatatattgtgtgtctgattttgattactgtatataatcgttttttagtaaatgctctttcattttttgtatagccttcgcttcgtcagatccatttgcgtgtatatatattttggttccgggtttaattcctaaagccataatgtccatgatggcttttggcgcttgtttgaggttaacagttttcccttggtattcaagaaaaatatctgatgtaaaccgatgagctagtctgactaacagggtagccggtctcgcaaaccctgtttccttaatgatcgtaaattgtcttttaatcattcttcacctcattacattctgcctcttgacggatttatagttgggttgcagatcaaatttgaatttagagtacctttaggataagtgatctaatttcatcgaaataacactctttctttgtgtttacaaaataattctcaactaactaaaatggacaatgacttcattcgagaaaaaagcatgattcactatcagcttttgtttattattgtaaataaaaacatggtgtgtacaatggttacattcaggcgatttgttgattattcaacattccactctaaattgttgattatcttaagaaagtttggtgaaaagctatgtccaaagtggatagaagaataaccaaaagccaagaggctattaaaatagctctgattgagctgatgactgaaaaaagttttgatcatattacgattaaggaaatttctgaaagggcaaatgtaaaccggggaacaatctatcttcattacttagataaatttgatctattagaaaaaattatggaagagcatataaacaatatgggggatttttgtgagtcggcagctgaaatggactggattgaatcgactgtacactgcatggaataccttgagagtaattatttattcttttcgacgatgttagccagtgaaggcgctcgatattttcgcagtcagttccttaagtttaatatcgaagagttcaggaaagatgtagatgtaacgaaaggcaagaattacggccaaagtgaagatgtcattgttgaatttatagcaaatgcttacgtaggggtagtggaatggtggttaaaaaacgaaatgccttatccgcctcgtgtcatggcagaaaaagtgggggagttattagagcggattttataatggaggcaggaaatgggtgttgacttatttgtctaggcgggagattcaagtctcctcgatcgcatacaaaataccaagggccagcaacccttggtatttttataccttcatgcatttttgaagtttatgcttaaaggtctgccttactttgcaaatcgccgagctgctgcaacgcacatgataacggcgatattcactgctacgagtgcccagcccactttctcgtgcagaatcactgaggcaagcagcagcccaaaaaaaggctggagaagctggagctgcccaaccgccgcaattcctccttgggcaagacctcgataccagaacacaaagccgatcagcatgctgaataaggatacatatgcaagactgagcagtgcgggaacgccgatgtccgaccatgagtccggcgtaaaaaagaacgacaagggcagcataagaggaagcgacagaacgagtgcccatgagatcacctgccaattccccagacgccgtgaaagccttgccccttctgcataaccgagaccgcatacgacaatagaagccagcatgtacgcgtcgccaagcggggatgaacctcccccctgaatgagggcgaaacctgctactaacaagctgccaacggttgagaaaatccagaagacggggcgagggcgttcacccccgcgcagtacgccgaagaccgccgttgcaagcggaagaagtccaatgaagacaatggcgtgtgcggaagtgacatgctgaagcgctaaagctgtcagcaacgggaaaccaatcactacgccaaacgctaccactaataatgaaatgaggtctcttttggcaggatgctgctgccggaagatgagaaggagacctcccgccagtacaccagctatcgcagcgcggcaaacggtgagaaaaaacgggtcgaagtctgacacagccaaacgggtcgcaggcagcgagccgctgaaaatgagtacgcctataaaaccatttatccagccatttgttgttttgttcattataatcactccacatatctttcttgttcattgtctgtattttcttaacaaaaccagcagctaaggattacaatgactataaactggaattggccttttttaaacggccagttttcataaaaaaatgcataccagttaggagaacaacgtgcaaatggatatcacgccttttttgaatagaactctggatattccgctttatcagcagctttatcggtattttaaagaaaatatgcatcggggccgtattcaaaaaggaatgaagcttccttcaaaaagactcctggcgaatcagctttccatcagccaaacgactgtagaacgtgcctatgaacagctcgctgctgaaggttatattgtgagcaagccaagaagcgggtggtttgctgattatcatgattctgattttgcttatgatagaatgccaagcacaacacccattcaacaagaagcagaagaaaataaacaatggattgattttcattatggaaatgtagattcttcttacttccctttttccgcatggcgaaaaagcatggtcaatagcttagaccaatatggacacgagctttatcggccgggacatgttttaggagagtttgagctgagaacactcattgcagagtacctgtatcaatctcggggtgttcattgcggccctgaacaagtgattataggtgccgggaaccctattctgctgcaaatcttgtgccaagtttttgagccgaatatttctatagggtatgaggatcctggttatccaagagcacgcaagatttttgaagccaaccgcatgaatattgttcctataccagtcgatgctgaaggaatctgtatacagaagatcaaagaacagcagccaaaccttgtatatgtcacaccttcccatcaatttacgctgggaacaatcatgacgatcaacagaagaattcagctgctcaaatgggcggccgaacatcaatcctttatcatagaggatgattatgacggggaatttaggtacacaggacagccggttccttctcttcaagggcttgatcagcataaccgtgtcatttatatgggcactttttctaagtctcttttgccctcgctgcgtatcagctatatgattcttccttcacctcttttaaaaaaggggcatgaaatcacatccttatataagcaaacagtgtcctgccacagtcagctaaccctagctgaatttataaaaaatggagagtggcaaaaacacatcaacagaatgagaaaactttaccgcaaaaaaagagccattgtattagaggcagtgcaaagggaattaggagagcatgtcagaattcgcggagaaaactctgggcttcgtatcttacttgacgtttatttgccatttggcgaaaaagagttaattgagaaggcgaaaaaacatggagtaaaaatttatcctgtttctctttcttatcaacatcatcctcctgcaaaaacggtctcgctcgggtttgcaggggtttctgaatccgacataagagaaggcataaaaaaactgaaggctgcctggaagatatgagggagctttcagtttagcaaaaaggccaagtgacgactaagtgttgagagctgttcaatattatttaagtatatgatgagtgcctgcagtccaggccacgatacgtctgtttagcgaaaaacagaattttttatttgctcctcacagtgctaaaataaacaaaatagacaattgaaaaaatagaggtgtaagaatgaagttagatgagtttacaattggccaggtcttcaaaacgaaatcattaaaagtatcaaaagatgatattatgcggtttgcgggtgaatttgaccctcagtatatgcatgtagatgaagaaaaagcgaataaaggcagatttaatggaattatcgcttccggcatacaaacactggccatatcttttaaactttggattgaagaaggtttctatggagacgatattatagccggaacagagatgaatcatatgacattcataaaacctgtatatccggatgatgaattgtttacaattgttgaggttcttgataagcagccaaagagaaatgaattgggaatactcacagtattgctatctacttataatcaaaaagaagtaaaagtgtttgaaggtgagttatctgtattgatcaaacgataactcagaaagcccgcttttcgcgggctcgattgaagcagatgggggaaagatgttagcgagtttcctttgaaaaataagaggttaaaacatcataaacaataggcaaagaagtaaatccctcatcttctagaaaatgacctccgtgctgaacttcatataacgcagcatcaatttgttgtgccagatccttgctgaatgaaaaaggcacaatttggtcgtccttagaagcaatgacagcacggtgcttcgcggactcaatgattgtttgatgatcaaacgatccctgtgtaaattcatctaacatctttaaagtgggcaatgatttggcaaagccggaaacaagtatgattccgccaagctgttttcgtaattgaagatgttccaaaaatctcaaaatggcggggcaacctaagctgtgcgcaaccaaatacgtattttcatgtaaagtgtgctgatataaagagagtgtatccagccaatcctcaagtcttggctggagcggattaggcatgtttaaaatgtctgcttggaccccatctgcgagcagacgttttttcagccaagggaaccaatgatttgttgaggaggctctgtagccatgaatgatatagacttgttttgtcattatttcctcctaagaaatattttcattcagtataaaattcctctcattgggaaacaagtacgcacttttttgtaagtagctttacatatgaggccctccttgtgccattccccacttacacatctcatctatgaggggatacaaagatcgccctctgtcagataacgaatactctactttcagtggggtttgagaaacctcagaccgatgaataaggccgtcagtttgcaattccttaagctgtgcgcttaacattttatgggtgatgaagggcatagcccttttcagctcgccgtatctcatcgttttttcactaccctaactcatagagaattctcattttccatttgccccctataagagataaggtgtattcaaatggggcttgtttactgcggcacaggctattcattgtaatcaaacctccttttttaagtatcatatcagaataaattaggattttcggtgttgaagtttgagggcgattcacgatctgaagtgaaaggggccgcttgctcaacaggcggcacggtacatgaatgttctaagtcaaagagggttaccttactgttagttactttatttaaaaaaacgcatgtttttagctgaaaatatctattatggtatatttaaatataaagaaatatttgagaaatgaggaatggtatgaatacacccaaaaaacataagaaatttaaagcgaaaatgattctccaaatcatcatggttatcattggaggaatcatagcggcatatggactagaaacagtgctcattccaaacagtgtatctgatggaggggtgacgggtcttagcatcgttggttcacagctattcaacttgccgctggggattttgattgcagtgatcaacattccatttgtctggttaggatataagcaaattgggaaaagctttgcattattatcaattatcggaatcgtatcgcttgccgcggggacaagctttttccaccacacacccgccatcatagaaggagataccctgttaattaccgttgtcggcgggattatccttggattcggaatggggctggcgctgcgtaatggcggcgcattagatggaattgacatgcttgctgtgctgctatcccgaaaactgccattcggaacgagcgatctcattctattcttaaacctatttgtgtttatctttgtttccacagtatttggcttacaaggggcattgctttcagtcattgcttactacattgcatccaaagtgattcatgttgtggaggaaggcttaagcggctctaaaacctttcaaattattacaacccaacctgaattaatggtagagacaatacgtgatcaattaggccgaagcgccacatataaagaagcttacgggggtttttcccacgagaaatttaaagaaatcacatgtgtcatcaaccgtttagaagaaaccaaactaaaggaaattattaatgatattgataaatccgcctttgtcaccgtatatgacgtagctgaagtgaagggcagcaattttagaaatcttaatcatcactaaaaaatagaatgacctttttaaccgtaactgacatgccgcgggtaatttaatcaaaaacacttttttgagggcttgtgggtgtcaccagtgaaggtctgaatcataaaaataccaagggaatcaaaacccttggtattttttctggttattagattttatcttcagctttacgtgctgcttcgagcttatcaatcctgtctttatatttttctccccagtccttcatgtgcaggataacaggttctaatgttcttccaaactcagttaaagagtattcgacttttggagggacctgtttataaacctcgcggtgaatcacgccatcccgttccaattctcttaattgcagcgtgagcatacgctgggtaattttggggtatagttttcgaaactcattaaacctttttttaccgtcaatgagatgataaagaagaatgcctttccacttacctccgatgatatctaatgttgtctccaccggacatccttcaaagtcatcagaagaataatcaatgccgagtttacgatttctcaagctgttcactcctaatagtatactttttgatactatatacattcaatgtgcgtactttttatatattaatatacatcatataatgatgtcacatctaaggaatgaaaggaatggatcatatgaaaacactcgtactcgttgtacatccgaatatagaatcctctcgtatcaataaaaagtggaaagaagccgttttaagtgaaccagatgtaactgtccatgatctttatgaaaaatatcgcgatcaaccaattgatgtggaatttgaacaacagcagctcctggcccatgaccgtatcgtttttcagtttccattatactggtacagcagcccaccgcttttaaaacagtggtttgatgaagtgtttacgtttggctgggctcatggtcccggcggaaataaattgaaggggaaagagtgggtaactgccatgtccatcggttcacctgaacactcttatcaagccggcggatataacttgttttcgataagcgagctgacaaaaccgttccaagcatctgcccatttagtaggcatgacctatctgccttcctttgccgaatatcgcgccaatacaatcagtgaccaagaaattgccgaaagtgcgaatcggtatgtaaagcatattacaaatatagaattaaacccgaaggttcgcctgcaaagatatttgaaacagctggagggtgtcgatttaacataaagattgattttggaaaatcctgtactcaccaagcaggattttttcttgttcagcagagggattttaacatatagcgaaaaaagaagaagccaccaaaaataagctatttgcttggtcctgactgcttatttttggtgatatacttatttctctgtgatgaaataaagcaaagcgatgaccggaaaagcgattccaatccataatgctgtactccatccccctgaggcatatgcccatcctccaattgatgaccctatcgcaccgcctagaaagaagatcgccatgaataatccgtttaatcgactgcgaatttcaggcgccaacgaaaaaatagcacgttgactgagcacaaggtttgcagatacacccatatctaacagaatagctgcggccactagaactgttataccgacgggggagctgctctgaatcatgaggggtaataataaagagacaacgacaacaacgagagcgattccagtggcaagcctggttaagcctcgatcagccaggcggccgcctattggtgcagcgactgcacccgcaatgcccaccaatgcgtagagtgctattgccttctgagaaaaatgaaaatcaggaccggccaataataaaggaacggtagtccagaacaagctgaaagctccaaatacaaacgcatgatagatggcacggcggcgtaagattggagtcgtgcgcagcagcttccacattgaaccgagtaaggcagtatagtttgtatttgctgttggttttctggcaggaagcacttttgataatacgatggccaggataacacttaccacggcggacaaagcgaatattgcattccacccccagatatcagcgactagactagatatcggacgggaaagcataatccgagtaataagccgctcatgacattgccaacaacccggccgcgtgcagcgtctgatgcaaggtatgatgcaaatggaacaagcacttgggctgcgattgatcccaatccgacgaaaaacgcagctgctaaaaacagtgttccatgcttcacaaatgctgttagtgtcaaagccgctgcgcttagaaggagcgatacaacaataagttttttgttttcgataatatctcctaaagggacaaggaatagtaagccggcaacgtatccgatttgggtgagtgtgacaatcaatccagcaccgcttggagaaagtccaattgccttactaattaatccgaccaagggttgtgcatagtaaagattagcaacaatgataccgcatgcagttgcgagaagaagggttaaactgggtgaaatcctctgacctgcttgtttgtttccattagccatatgaatgaactcctttttaagtggttttttgagtgtaatcatgacttctcacaagtgattttataaactgaacgttcagtttcgtcgattaataaaaataatatactaaacgttcagttttgtaaatggatttctgttttctttttttattcaatttaagtatactgaacgtatagtttatattgcgggaaggaatgatttatgtgcagagtaaacgagggcggccgcgtgatgaaggaacgcataaggcgattctctctgcagcctatgacctattgctggaaaaaggcttcgatgcggtgacagtcgataaaattgccgagcgtgcgaaagtgagtaaagcaacgatttataaatggtggtctaacaaggctgccgttatcatggacagctttctttcgaccgcgacggacaggctgcctgtgcctgatacagggtcgtcagtacaagatatagtaacccacgccacgaatttagctaggtttttgacaagccgggaaggaaccgttattaaggaattaataggtgcagggcagttggatgaaaaattggcagaagaatatcgcacgcgatttttccagcctcgccgcctccaagcgaaaggccttctagaaaagggaattcagaaaggtgaattgagagagaatcttgatattgaagtaagcatagatctcatttacggaccaattttctatcgtctgcttataacaggggatgaggtgaatgattcctatgtgcatgatttggtgatgaacgcgtttaagggagttcaagctacctctgctacagagagtatgtagctgataagaactgcaaaagctgcggattatatgacaaattggttccatcgtacgtgaaatataagatttttgttgctgagcggaatcgagggaaaagttctcttatcggatgtcgaaaaagaagtcattcaatcgtgaatacataacatcatattattacattccttttcatcgattggaacaagggttctatacttcaatggaatatcgcaaagttggagtatttaaacaacaggggaaaatcgatggccattatgtaggtgtcatggcaatcgaaaaaatacttgcaatgtaaacaggcctctaaagagacctgttttttaatatccagatgattgtctagtttcagcttgggctctatgactactcccataactgaaatagtctaatatttataccggaatatttgatgttccaaatataagggattgtttatataaataaaagtttatataatgacgggggcgctaaggaaacgcggggagcgactcaggttttgttcgaagttttgatccttaagatatacggagcgctacatatggaaacgtaaaggggaatgtagaatcatttggcgtgtatataatgatttgcttatatattgatttgggaaggaggagctcatatgacgattgatgttgcggcgatgactcgttgtttgaaaacgcttagtgatcaaactaggcttataatgatgagattatttcttgaaaaagaatattgtgtctgtcaattggttgatatgttcgaaatgagccagcccgccataagccagcatttgcggaaattaaaaaacgcaggttttgtgaatgaggacagaagaggccaatggcgttattattcaataaatggttcctgtcctgagtttgatacattgcaattgatcttacatcaaattgatcaggaggatgaattgttaaaccatatcaaacaaaagaaaactcaagcgtgttgccagtaaggaggcattagattgacatcaatgattttggcagtattcatctttttattaactctagtattggtcatatggcagccgaaaaatttatctatagggtggtcagcctgtggaggcgcagttttagctctaatagcaggtgttgtcaattttcatgatgtgttaactgtgacagggattgtttggaatgcgaccttggcttttgtggccatcatactgatatcgttaattcttgataatatcggtttctttgaatgggcagcgcttcatatggctaaggctgcaaaaggaaacggtgtgcggatgttcgtttatgtatctctattaggagctatcgtcgccgcgttatttgcaaatgacggtgcagctcttatattgacaccaatcgtattagcgatggtcagagcattacattttaatgaaaaattagtttttccttttatcattgccagcggatttattgcggataccacttcgcttcctttagtagtgagcaatttggtcaacattgtttcagcggactattttcatattacgtttattgattatgcatccagaatggttgtgccgtacttgttttcgctgctggcgagcatcattgtactttaccttttctttagaaaaagcataccaagacgctatgatctgactgaggttaaaaaacctgttgaagcaattaaagatcaaaacatgttcagactgtcatggtatatcttagggctgctgttaattggatattttgcaagtgaatttttttctatccctgtatcagtggtagcgggcagcattgcgatcattttcttaatcgctgcgcaaaagagtccggccgtccatacaaagaaagtggtgaaagaggcaccgtgggctatcgtattcttttcaattggcatgtacgttgttgtgtatggtgtccgaaatgccggattaacggatgtcctttcagatgtgattcaagccgcagctgatcaaggattgtttgctgggacaattggaatgggctttattgcggcgattctttcttccgttatgaataacttgccgactgttatgattgacgcattggctattgccggtacagatacacatgggatgatgagagaagcgcttatttatgcaaatgtgatcggttcagatttagggcctaaaataacgccgattggttccttggcgacattattatggcttcatgttctttctcacaaaggtatgaagatttcctggggcacgtattttaaaacaggaattatcctcacgatacccactttattgatcacacttgtcggcctgtatatttggctgctgataatccattcttgtttctaaaaggacaaggtcactatatcaaggaaaacaatgcactggtaactcttgacgcagccaaatggctgaagggtgggggagaaaataccttggggctaagtggaatgtgtacagcgcaggaatcgaagctcatggatgacatcgagtgctgttaaagcaatgaaagaagcagggattgatatttcaaatcaaacatcggataaatttgatgatccggcaaaagcacacggaacagaagaagtgtttccaaagggtccgtgatgaaattggtgaccgtttaaaacagtttgctgtaactggagaataaagaatcgatatactcagcgttttcttgggttatataatgcaatgtgttgttcaacaggtgtctgcgggctgagtgcaaacacctgtttttgttttttatttgtctgagattcgtaacagggaagttatttagctggtgacagaggaaaattgattttgtgaacagaatcatgaaggagacggtgttttaaaggagttgtctgttttgcaggaattaacaaaagaaaaatacagtagcttaaaaacaatgtttgatgacaaatattgtcccacatttgtctattcaatattagaccaaaccattccgggagctgtttatgcagatgatcaaacctttcctaaatcgttttttataggaactgaatcaggcatttattttattgcgggagaccaagggaatcgggattttcatgatttcattgcaggatattatgaagaacaagtgaaatcatcaaaacgatttaccttgttttcttccagtgatacatgggatagcgtactgaaacccatactgaaagatgacttaaaccaaatgagaagagctgcattttcttatcaaccaaaatctttcaaaaagactttgcaactgccaaaggggcttgtattgaaaagaattgacgaagacatcatttcacatagcacagcgtttaacagcgcgtattatgaggagtattggaattctgtctcacagtttgcttcaaaaggttttggatttgccgtattacatggcaatcacgtagtaagtgagtgtacctctatatttttagggcataatcgagcggaaatggatatctatacacttgaagaatatagaggactggggttagcttattgcgtagcaaataggtttatagcgttttgtatggaaaatgggattgttcctagctgggattgtgatatttgcaacaattcgtccattgcattagcagctaaactagggtttaagacggtaacggaatacactatttactactctggctaaccttaatgaaagaaccttaaaaggagataccaaccgatgttggtatcttttttgttttagagtttttttacccttttagcagaaaaatgggtgatgaaaatcttattcattttatttacttttaggtaggtaaaacataccccgccaactgtaaccactccgcctagcagagagagcagtgtgggtatctcgccgatccagagccaagatatgatcaaggctaaagccggtgtaacataaagtgaaagggttgcttctgaagcaccgacgagtgaagtgacatatgctagtgcgaagtaaggaataaccgtcggcaataatcctaagtaaacgatagacaaagttgcgcttattgaagcgttcatcatctcttcgcctaagcctggcagaaacacaagcataggtattgttccgccccaaatggtgaatgtaacgaatggaataaaaccatatttttttatatagcgggcttgaaaaacgaaataaatactctccgaaaatgctgccagcaggatgaccaagataccgctcattgaatatgtaaagtctcccgccccaaatgcaatcaataatacacccaataaactgatcatagagccaagccatttcgtaaatccaaaatgctctttataaaacaggcgggatagcatggctgagaagatcggtgccgtagtaacgagtaagcttgcaactccggcactaactgttttttcaccgatgttcagcaaaatgtgatagaatgcaaatcctaaaaaccctaaaagaaaaatggcaggaatgtctttcaagtcgggtaggcgcatctgagtcaaaacagcaaaaagcaataatgccatagagccgattaacaaacgaaataaagcaaggtgttctggcgtgtacccttcaagtcctgcgcgaattcccggaaaagcagatgcccataaaccaatcatgagactatgagatatcattatttgaactgttttctttcgcattcctctcactcctctttacaaaaaccaaccagttatttaatgtgtttctatactaataaagatttgatgatatggcttcaaccagttcaatagattttgacccaaccaatttattttaaggagaccgattctatgagctttccagaagaaaaaaagatgaaaaagctccctaagtacagacaaatcgttcattttattaaagagaaaataggaaatggagagtggccgattggaagcaagattccaagccagcgcacgcttgcaaaagattttcaggtaaatcggagcacagtgattacagcgttagaggaattgatggccgatgggctaatagaaggcacaatggggaaaggcacagttgttatcaacaacacatggacactgatggctaagaattctgctcccgattgggatcaatatgtcacctctggcattcagatgccaagccgaaaaatcgttcaagagataaatcaatcagaatcaaatacagaccttatacagctcagtaaaggtgaactttcagctgagatttttcctttggctgttatgaaagagatgatggggaaggtatctcaacacatggaggcattcggatatgaagaaccaaaaggttacttacctttgagggaggcattaagcaactatttaaaaaccattggaatcaacgtctcatcttcttccattctgattgtctcaggagcgttgcaagccttgcagctgatatcaatggggctgttacaaagaggatcaaccgtttatcttgatcagccctcctacctttattcattacacgtatttcaatcagctggtatgaagctgactggacttcctatggataatgaaggacttttgcctgaaaatgttcatttaacaagaggagagcggggaagggctatcttatatacaaatccatgttttcacaatccgactggtattcttatgtctaaaaagcgacgggaagaaatcctagcagtaagtgagaatacacagcttcctattattgaagatgacatttatcgtgagttatggatcgatgaaattccgccatatcctattaaaacaattgataaaaatggacacgtactgtacataggaagtttatcgaaaacattaagcccaggtttgaggattggatggatcgtcggaccggaaccggtgattgaacgtttatctgacattaaaatgcaaacagattacggatccagttcgctatcccagagagtagcggcagagtggtttacttccggccactaccagcagcatgtagaaaaggttaggcagcaattaaaggtgagaagagaattggccttgagtgctttagaaactcatttgaaagaagtggcgacatggaatatcccaaaaggagggttttttgtctggataaaaatattgccttccatatcaatgaaattactttatactaaagccttatcaaaagggattctgatcaatctcggcagtatctatgctcaggaaaaagggaattatattcgcttatcatatgcttatgcatctcttgaagaccttcaaaaggggatttatgagttgggtttaatgattaaagaattggcaagcaggtaacttttatatccttaaatggatgtttcactaaaaaagagatcaagcctaatgatcgcttgatctgataataacaagggttactagaatagaccaaatcatggttcggtcttaaaataatcatgtctctgaacgaaaagtctttccgacttctcttcctaaaccaaagtagtgtctgaaattatagataagcgggctccatttggaagggttgatatggttttcgtccagaatgatactttcctcggcatgaaaatgtagtgcctgcgtctctacaattgcgaatgacgattcatattctggaagccgaatgtgtttcacttcggcttcgatttggatagggcattctttaattcgtgttggtgatactgtttttgattgtaaaggcgttaaccctgctgcctcgtatttttcttttttatatgtaaatccgagctgcttctttaaaggcggtatactcttttttccgctataagatgaaattctttcaacgttttcccataaatccgggccaggcaagtttatgacacactctttgtgtctttccaaattgtcgatggcttttcctcccagtcctactccaaggattatataatgtccaagagcccaagaagaagacataggactaatattagtggttccatcctcattcaatgtggttagaagaaatgtcgaggtaccataatacatgatcttgggtttgatttccttaaatcgacgagtgtcttgttttttgatgtccaacgttttttcctccttgtcacgcttacatttatattgtaaaggattaacatttcaactatcatcgaaatatgaatgtaaggaggaaaatcatgaatcctaatattgcaaaaatctcttcgttgctatcagatccctcgcgttcttccattcttctcagtctgatggatggaaggatacaccctgcgggagagcttgcatatctcgctaacattaaacctcaaactgcaagttttcacctgaataaattgcttgaagcaaagctgattagcgtagagaagcatgggagacatcggtattacagattggctgactcagatgctgcaaatgtgatcgaacaattgcttcatattgcgcctaaagcaaaagtcacatctttaaaagagtcaaaagagaaaaaggacttgcatttcgcccgtacctgttatgatcatttggcaggttatgtgggcgtgcaaatggcacattcattagttgagcaggggatgttaaaaaaagttgatttaaactttgaggtgacttcagagggtgctttattcttttcaaagttaggcatcaatgaagagcaacaacggaataagaggagagcctttgcccgctgctgtttggattggagtgaacggcagcatcatattgcaggagcattaggaaacgccctattggtgcgcatgttagaagaagagtggatcgttcgtatgcctaaaacgagagcgattaggattacacaaagcgggaaaatcgcgtttgaaaagcacctaaacgtgaagatttaggatgttgaagcgaaggcacgatatccaggaggaggagtaagatttgttctaatcttactccttcttcttattttgaagcagctcgattccccattgcaatagagatgcggttccaactgtttatttgattaatgatcagaacaaggtcaacataatgtttttcatcataatgttcccgcacccgatgatatagctcatcaggaacccttttagatggaatgagcgtgatgtgttcagatagttcgagagccgctttctcttcaggtaagtaaaaatcacattcattccaagcatgtaaacagtaaattcgctgttcagtttcccccattttgcgggcatcggacgtatgcatatctatgcagaaggcacagccgttgatttgagagactctgattttgattagttctctcgtcgttcggttaattgaggattgtttcgtgtatttctccatatccatcatgattttcataccttcaggtgcaatctcatagtaggacactctttgactcataaggcaagactcctttccattgaatacctagattgtatcccggtattgatcattttaccaatgtgcggtttgaatgacagctgtttcagcgtcttttggaaagaagtttctttgaataaaaataagggtagccagcaatgatgagtggggctgctaatgcaagcagtatccatgagcctgattggctgtctctagtgactctaatgaatatataagtaccgatcagaaaatataataaagcacctagaaaccaatacatgttcaatcctctttttccttgctttttggttgcgcatttttgtctgtcatatggcttaatcgatcagggttctgattttttaataccttttcggtccggattccttttctctttaatgataaaattgtgagatcaatcgatttcaatgatgatcattccttcaatgaatagtaagttccttatgattttaaaggtaaatttgaaaagataaaacgtacatagaggcagaacgttcatgtacgtttgggcaatgatcacttattggaaactctaatgtttccctgcacctgatattgttgtgttccttctcttcctataaaatgattggatacatgtatgtttgcacgttgaaatatgggttcgattttcatgaatctctattcggtgaaacaggtaaaggaagtggataaggtttgcttataaggaatccttttaaagataaatattactcacatgataggcgggcattaaacatgcttgcactcagagtgccgggcctggcttttattctcatgatctatatagcctctatcgtgctgcaatttgtttctgggggctggtccattttattgctttatgcgtttaccatattaatcgccatttttgctttgcttcattggcactcatatcgctgggttaagaaaagagtgattctgtatttcgcggtacaaggtttgatcacctttgcacttgctaatctcatgactggcttctttatacttgtcattatcggcctttatgcatttttaattggacaaatcataggaatggcagacagaagaaggacttttctcattctttatctattgctgctgctggtcataaattcggcgtttcaccttcataaaggtgaagttttgcattttattgttattgctgggccaatcatgattgtcatcatcacttatgctgcaacattttttgcccaagtcgatgaaaaaataaaagctcaattgactcttgaaaggctggagctggctcatcagcaggtagaacagctgacgctgcagaacgaaagacagcggatggcccgagacttacacgatacgcttgctcaaggtcttgtcagtttaaatatgcagctggatgcgattcatgttcatctcgccaaaggcaacacagagagagcgaaggaaatcatacaacaatcgatgaaaagagtgaaaagcacattagctgatgcacgttcagctattgacgatctccgcagcaaatcagaagaaatcggtgttttaaaagaaagaattacctcgctaatggatcattttatagagtcgacaggcatggcttgtttattagattacagattgcatcaggtgctggatgtgcgtacagctgaaaactgttattacatcattggagaatgcatgacgaatgcggcaaagcatgctgaggcgaaaacaatctggatatccatttgggatgatgaaaagggaaggctccatttaacagttaaggataacggcaagggatttgatgttgaaaaaggaaagaaaaagagaggacattatgggcttcttggcatacaagaacgcgtcagggcaataaatggccaattcaatatcaagagtacaaaattgaaaggaacacaaattgagatcactgtaccaattcagggagagatgcaagatgaataaggttttaatcgttgatgaccatcttgtcgtgagggaaggtctgaagcttttaattgaaacgaatgatcaatacaccattataggagaggcggaaaatggaaaagtcgcagtccgtcttgcagatgaattagaaccggatatcattctgatggatttgtatatgccggagatgagcgggttagaggccattaaacaaataaaagaaaaacacgatatccccatcattattttgactacatataatgaagatcacttaatgatcgaagggattgaattaggagcgaaaggatatctgttaaaggatacgagttcagaaaccctttttcacacaatggatgcagcgatcagaggaaatgtgctgttgcagcctgatatcctcaaacgtctgcaagaaatccaatttgagcggatgaaaaagcagcgcaatgagacgcagctgacagaaaaggaagtcattgttctaaaagcaattgctaaaggtcttaaaagcaaagcgattgcctttgatttgggcgtctctgagcgaacagtaaagtctagattaacgtccatttacaataaattaggcgcgaattcaagaactgaggcagtaacgattgccatgcaaaaaggtattctgacaatagacaactaaactgcatatttgaaagttgcccaaacgtacatgcccgaatgtacgtttttttcatttcattgtcaactacaatgagaaagaatgtgatcaagcaatgcgttgaaaggagattatcatgtcaaaaatgttatatacattaggaggatgggttgctcgcaatcgcataaaagcaatatgtgcgtggatcgttgtgttagttgctgcgataggccttgcagtgaccttgaaaccaagtttttctgaggatatgtccatacctgacacaccttcggaaaaagcgatggatgtgattcaaaaagaatttcctcatggtcctgataaagggagcatacgggttattttcggtgctggtgatggggagaaacttactgggaagccagcaaaaaaagcaatagaagatacgttcaaagaaatcagtaaagatgattctgttgactcgattgcaagtccttttgtgacagggacaatcgcgaaagatggcacagttgcctatgctgatatcaagtataaatcatcagcagatgatataaagaattactctatcaaacacttaaaagacagtttgaaactggctgatgatgaaggattgcaaactgagctaagcggagatgtaccgggagccgagatggagataggcggtgtctctgaaattgtcggcattatcttggcttttgtcgttttagcccttacattcggttctttattaatagcaggtttgccgattttaactgcactgattggtttaggtgtaagtattggactggttttgattgggacacaagtatttgatattgcttccgtcagtctttcattagccggaatgattggccttgctgttggtattgattatgctttatttatttttacgaaacaccgccagtttttaggcgaaggcatacaaaagaatgaatcaattgcgagagcagtgggaacagcgggaagcgcagtcgtttttgcgggacttactgttatcgttgcactttgcggattaactgtcgttaacattccttttatgtctgcgatggggctgacagcagggcttagtgtactgatggctgttttggcttccatcacacttgtgcctgcggtcttatcgattgcagggaagcggatgattccgaaatcaaacaagaaaatagaaaaacaaagcactgaaacaaatgtctggggacgctttgtcaccaaaaatcctatcatgctaagtgtatgcagcattctgattttgatcgtcattagtatcccatctatgcatttggaactgggcttgcctgatgctgggatgaaagctaaggataatccggatcgccgggcatatgacttgcttgccgaaggctttggagaaggatttaatggccaattaacaatcgtagcggatgccacaaatgctacagaaaataaggcggaggctttcgcagatgcagtgaaagaaataaagggtttagaccatgtagcaagtgtcacccctgtaatgcctaataaagaagggaactttgccatcattacggtcgttccggaaacaggtccaaatgatgtcacaacgaaagatttggtacacgatgtacgcagtttgtcagataaaaacggagtagatttgcttgttactggatcgactgcagtgaatattgacatttcagatcgcctgaatgatgcgataccggtgtttgctgtacttattgttggctttgcgtttgtattgctgaccatcgttttccgttcgctgcttgtgccgcttgttgctgttgcaggtttcatgttgacgatgacagccactcttggaatctgtgtatttgtcttgcaagacgggaatctcatcgactttttcaaaatacctgaaagagggccgatactcgcgttcctgccgattttatctattgggattctgttcgggttagccatggattatcaagtattccttgtcagcagaatgcgtgaagaatatgtaaaaacaaacaatccagtacaagccattcaggctggattaaaacacagtggtcctgttgttacagcagccggcttgatcatgatcttcgtttttgcaggatttatctttgcaggcgaagcttctattaaagccaacggattagctctttcctttggtgtgctctttgatgcctttattgtaagaatgacactgattccaagtgtcatgaagctgatggggaatgcagcttggtatttgccgaaatggttagacaagatgattccgaatgtggatatagaagggcatcaactgacaaaggaaatacagccggaaatagatcatgaacaaaagaaacaaatcagtgtgtaatagaaaaagcagatctttaatgatctgctttttttgcatatggtagtatttagaagatgaagtcggcagttaaaaggagacacttatggcgccatcactcattttcgatatggatggaactttgtttcatattggcagaagctgcatcatactagcaggcatcccaggagaagtgacatgattttttgactttgcattcactacttgatgccaaggatcttgagaatccttcttgaaaataaaggattttacaactgatcatataagaaacctaaagaaacaagcacacaaaaccagctgcgggttttgtccaagaaaaatagagtccatgagagagactctattttttgaaatgcccggctagaagtatattgcaggtctttatgaatgcaaaacactatcttataagcccttaccgtgaaatgcctgtttctgcattgaaaaaacgcattacacgttcatttacgtaagcgggttgttccatcgataaaacatgtccggcatttttaatgacttccgcctcaatatcaggaacgaatgaagaggctcggtgcagggctgagtggggatcatagatgacttcatgttcaccaagtaataataggataggaactcttgctgaacgtaattcctcatcggtaaaaacatacggaaatccgtctgctttaggatttggatttcttgatccatcctgccacattacccctgcctgaaactgcttcacaaaaatcgggtgcagcacattctgatcattcatcatccaatttaagaatgtttcaactccatttgacgctgtaaggccaagagcgtatttgtagaaatcgtgatgaaatggcaaaaacgtttctgccggactcagtatagctgcgctttttactctctcaggcatacgtaaaaggaaattcatcgtatggagaccgccaagcgaaagtccgatcatgtgggacttttcgatccccagattgtcaaacacatcaagaagccaattggcgtaatccgttcttgtaccgcttaaattctcaggaatactcttgtttttatcacctatgatatcaactgcataagttctgtatttgctgctccaatcggcgatgttgggataccacatcgtcgagctgaataatgctccgtggagtaatacaagcggcggggcatcctctgggccgcttgcaatcacatgtgtttgaccaaaacgagtagatatatagaatgatttgcaacggaccggccaaagactaaggctttcattataagtttgataatagcggataccgttgtcacttaattcgggaatactagatgaatggtttgacatacaaatgcccctcccaacattgtttaaatgaatgtgccgtttcgtgatggggaatctgattttgatataacagactttatttacaatataatacagttgttgttagacgtcaaatccaagatgaaaaggaaataaaacgattggaacagattattgaaaatcaatataacagaatattaacctcctttgtggagccgcttcattaaaaccgcaatccaaatgcatgaatcacaaaaatcacaacaggagggatcaagagggaaggcagcaaattcaatgttttgaacttcttgattccaagaatgcttagacctgaactgaggatgagtatgcctcccacaattgtgatttcattaataaggtctgtattgattgcgctctccattactttagcaaataaatagatggagccttgccaggcaaataatacaatggctgcagccgctattccaaaaccaaaagttgaagcgagcacaatggaggtgatcccatctaacatcccgtttgtcaggaggtatgtataatctccatgcaaagcggcttcaacagggcccaatattgacagcgaacctatacaaaataataagaccgcagtagataagccctctgctaaattacttttagaaaatttgttcaccagcttgttgaatcgtaattctaaattgatgatctggcctagcaaacctccaatggctaaactcacgatgaatagaatggggtatttactatcaggcaaatgctgtgtaatggcgttgatccccagcgcgactgcagcgaatcccattgcctgcatcaaaatatcctggtattcatctttaatgccttttttgaatatccccccgattatgcttcctgcaatgatcatcactgtgttaaaaatcgttccaaacataagctttctcctccaaaaatcattcctgcataaaaaataaaccctctagttagtagagagtcaagggagatcaaaacatattcatgagattatttgatgggcagcaggatttcagtcacgtaattatctaggttattcgtaatgccataatcaatgagtgtgatttcgattgagtcccctgctacttcataatgatgttctttcatatatgccagtaattttttgtagtatggttcggcttctggatgtgaccctttaaacctaatttgcagatattctcttgaaggaaagatgatttctgaagaagttttttcattttcatcttcaagaatcataaatatactggaatatttgtcaaactgttttgctttcacatttgctgcagaaatggataaaccgatcttgcctatgaatatatcttcgtttacattcaggtgggttctcaattcagctaacgaatgttcgatatcatggccgagaacatattcatgctgcaagtaagccacacgcattgcgggaagtttgatttttgaaatttgatgtaacggcatgttaacggcatcttctatatgtgtgatgcgtcgggagatctttcgttcgatgcgttccaattctttctttttgcgatcaatttcagcctgctggctttttagtaaatgaagaagagtgtttgtattttgagagttataaaaatcaagaagcttattgattggcaggcctagggccctcaaatacttgatggtatcaagccgctcaaactgttgggtagaataatatctatagttcgtttgctcatctttatattccggtttcaaaaggccgatttcatcataataccgaagagcagagattttcacattgaataactttgacacttctccaatcgaaaaaaattccttcattctaacaacctttctgtgcctatgattgatatacacacattatatagtacggcgagttctaaaggtaaagtttgcatcataaagaaaaagctccttctaaaaaggagcttttcactcttcgaaataaggatttacatggatgagcacttcttctacatctgaaaactgtcttttgatttcatttcgaatttcgcgggcaatatcgtgtccctgcttaattgtcaaatcatgatccaaagataaacggacatcaagcaatttatagtggccatgttctcgcgcgcggattctatcaattcgttttacttgatcacattgaaaaataacagctttatattcctctatcagctcgggatcaacactcttttccatgagcacatcaacagacggcctgattaattccattgaaatcttaaaaatgaggtaagcaacgattgcactggcaatggcatcggcgtacaacagataggaccatccgcgggtgtttccgatgatagccaacaggacgccgataaaagcggcaagagaggcaacgatatcgcctttatgatcgtacgcaatcgctataatcgctttgctgttccatttttccccttgctttatagaataacgatataagatttccttagccacgtacgaaatcagagccgcaaacaatgcgctgtattggggaacgcttggccctttaacaaaggacagaatcgcttctatgaggatataaacggatacgatcactaagataattcctacaatcgcctcactaatgacttcagcttttccgtgaccaaaaggatggtcttgatcgggcggtttattggaaattccgatcactgccaagactgcaatcgaagcaacgacatctgccgcggaatgtattccgtctgcaaacacggcttcactatcgcctaccagcccaaaaaagacctttcctgccattaagatcagattggcgatcaatgcaatcaaagcaacttttctgcttatttgttctctttcacttgccattttttcctcctataaaactgcacaaaaaaataggagtgctctatatacgctctccgtatcctttcctgtgtaatcactttgtttatcataccaattcaatttcgagtgggtctatagcaacgttgtttcctgtttactaataaataaggtgacagaaaaaaagttggagctatgctaaaaaggtcatacagcaaacaaatgagttcttatgtaacaacagtgatgattcgctattaaaatgctgccgtcagtgaaaaatttccacctaattttcaaaaacctattgacatgagaagatctgtattttactattatctcatattcaagatattttaatttgagatatttggtcggaaagatcagcgatcaagcgcatctctaagtgttcaatccgttgtcatttcttttacacaatattcaatatggattttttataataaaatatctcgaattcgagataaaagggagtgtatcgtaatggctgaatttatacagttagtcaatgaaagacgatctgcaagcaattttctttcaggtcatccaatcacaaaagaagacctcaatgagatgtttgatttggttgcattggcgccatcggcttttaatttgcagcatacaaaatatgtggcggttcttgaccaggacgtaaaggaaaagctgaagcaggccgcaaatggacaatataaagtggttagctcttctgcggttctcttggtattaggggataagcaggcatatcaacaagcggctgatatctatgaaggtttaaaggtattggggatattaaataagcaagagtatgaccacatggtgcaagacaccgtttcgttttatgaaaacaggggagaacaatttaagagagatgaggcgataaggaatgcttcactttctgcgatgatgtttatgctgagtgctaaggaaaaaggctgggatacctgcccgatgatcggctttgatgcggaagccgtaaaacggattttgaacatagacgaccaatttgaggttgtcatgatgattacgattggaaaagaaaaaacagagagcagaagaccgcgcggctaccggaagcctgtgaatgagtttgttgagtatatgtaaaaggagcggataaaaatggctaaaaaaacgatgggaattcatcatattacagcgattgtcggtcaccctcaagagaacacagatttctacgcaggagtgcttgggcttcgtttggtcaagcaaactgtcaattttgatgacccaggtacgtatcatctttattttgggaatgaaggcgggaagccgggaacaatcattaccttctttccgtgggccggagcccgccaaggcgtcattggagacggtcaagttggcgtgacttcgtatgtcgtgccgaaaggggctatggcgttttgggaaaagagactagaaaagttcaacgttccctacaccaaaatcgagcgctttggggaaaaatatgtagaatttgatgatcctcatggactgcacttagaaatcgtggaaagagaagaaggagaggctaatacgtggactttcggagatgtaacgcccgatgttgccattaaaggttttgggggtgcaaccctattatcagcgcagcctgacaaaaccgctgaccttttagaaaacatcatggggctggagcgagtcggcaaagaaggagacttcgttcgttatcgttccgccggtgatatcggaaatgtgattgaccttaagttaacgcctattggccgcgggcaaatgggggccggaacggtgcatcacatcgcttggcgggctaacgatgatgaagatcagttagattggcaaagatatattgcttcgcacggatatggtgtaactcctgttcgggatagaaactactttaatgccatttacttcagggaacacggggaaatcctgtttgaaatcgcaactgatcccccaggctttgcacatgatgaaacacaggaaacaatgggcgaaaaactgatgctgcctgtgcaatatgaaccgcatcgcacacaaattgaacaagggctgctgccgtttgaagtaagagagttagattgatttgacacataaaaaataaagaaacatatattcaattgatgattgctggataccgtcagcaaagaattagataaaatcaaagatgaggagagatacaaatggaagatgcaggactgttgcttattcgtataatgattggtgtggtgtttttgttttatggcacacaaaaattattcggctggtttggcggatacgggattaaaggaaccggacaatggttcgaatcaattggggtgaaaccaggaaacgttgcggccgctctatcaggtcttggggagttagtaagcggaattctatttattttaggcgtattcctcccgcttggagctgctatcataacgatcatcatgttaggtgctatcgtaaaagtccatggagcgaaaggttttgcgaatggcgccggaggttttgaatataacctggtgctcattgcagtttccataggggttgcactcatcggttcaggagcttacgctttgcatttttaatacgaaagtatgtaagaacagttgcagcttgtcggtaactgttcttttattttgacattttcggcaagcttgcaggtactctgcaaagcaaaaaagcggatataataaatataaatctgtatagtgaatgatacgtattgatgagcttggtcatgaaaaacagacctatttgaaggagtaaatggatgaaagagatgacagaattacattcattagtttttatagaaaactttatcaaacagcacaaattcagttttatttatatatcaaggcctggctgttcagtatgtcacgcagttctgccccagctcagaatagtattggatcagtttccaaacatcaaattggggcatatcaatgctgacgatgtagcagaggtcgccggcagattttcagttttcaccgttcctgtgcttcttttgttcattgatgggactgagtttctaagagaagcccgttttgttcattttgaacagcttgaacaaaagctgaaaagggtttatcgattatatgaaggcgaataaagaaataaggcaaaaaaaagaactcaaatgagttctttttttttgcatcaatttattcttcactaggcgaagaagggttatcaacctgcccttgatcacttgtatcattatcacaacttgctgaaataataattgaatgagaaggagagtaatctcctaatgtgaaattgacaccgtaatttttgctgttcgcagtatggctgttttgcaagttatgtccgatatctgtattggcgttttgtgtcattccatttatcgtgagatttgagatgttgatttgagatcgcatgcttcaaaaactcctttcactcagaagtagccgtcatagaggacgctggcagtctatttacttctatgatattgcgtttttatatcattgcatcaacataatggtaaaaataatagcgagtgaatgagtctcttttgaagatgatcaacctatcagcagaaataaagccgcctgataaagaggcggcagatcgttatatgtcatctatgaatttgatgtatcgtttttcgtttgcctaaaggatagaatggtcgtttttaatgatgagtaggagcctatagcagcgtagccataaaaccagcccataaatacgccagaaaagaggctgtgtcgatggcttatgaaaacagaaatgacaaggcctgttattaaggcaactgacggtacaaaagttttggggattttcaataatattttgaggatttgggttatcaatatgatgattggaacagctatcacagcatcccaaaagttcgtgtgaataattggaaaagccatacggcacctcatgaagtgtttatttcttaatttttacgctaaaagcttggaaagcagctcttggatcgcatatgttacattttgggcttgattggcggagcttgtttggcttaaagtattggattcaaaaaccaaacctgtattactcccaccggaaccctctgttgttttagacacagagaacgggctgatggaaactgcaaatccgttattaaaaacgctgttcccggatatcgaatgaatataaactgggaatttcatcattcatctctcctctctgttatgactgtttatacaatatggtgtgtgagcagcagttgcttaaacaaaacggcaaaaactttcagtaagagacaaaaacctgcaaaatgccacaagcgccttttgttaatgcagctttttagggacgttttttttattttttttaccaacttcatcaaaaatattctgattgccagactgggcttgtccatccttatttatgaaatcggggtgaatgagttttttcagatccctgactgttaaaggcttggcgtcatcagttaattctattcctaattgcccgtttgcctctaatgtcgcaattttgacatcttgtatagccgtaacgccgtgaagccttagctgcatttcaagctggtcagctgtaagtctcatcttctttaagttttcgatatgaagctgtccgttttcaatgacgatttttgcttttccggttaacatcttttcaatggtgttcgatttcatttggatccattccataacgatgagtgtgcttgtgaaaattgccgctgcaattaatgttttgaagaggctgtactcgatgattggctgaacgataatagttccgatcgaaatcatgacaaccgtttgagttgacgtcatttgtgcgattgatttccttcctgaaattctcagcaaaatgaccccggctacaatgagaacaagagattcccaagtgaaattcatgctaccacctgaccaatgatgaattagatttgtcatgggattggcttttcttccggccaatcgcaatttaatatatccgaaaggcagtcggttcattctgtcctgaaccgaacaatatttttggtatagatggatatattaagccaaacaatgatagcaacaggagttttttggccgaaacaatctgggaagcggggagcgccataacatgattgaacttgaagttgtcattagaacggttgccagctttggcttgctgttaatcgcagaacgaattttaggcaaacagacaatctctcaaatgacgatttttgattttattgcggcgatcacactaggggctattgctgccggattagcttacaatacttcaataaaatcgcacaatatggccatttcgtttagtatttttgtgctaaccatttttctaatttcgtttctgtcgataaagaacaggaagctgaggaaattttttgccggagatccaacagtgctgattcaaaacgggaagatacttgaatcaaatatgaggaaaatgcgttacacacttgattatttaaatcagcaattacgggaaaaagaaatatttaatatcgaagaagttctttttgccattcttgaaacgaatggtcagctgactgtgttaagaaaaccgcaattccggcatgtgaccaaacaggatttaatgattgcggtaaaccaagaacaaaggcttccgatagaacttattatggacggagaaatcattgagaataatttaaagcagaatcgtttgacggaatcctggcttttggaagaattgcgaaaaagagacataaaggtgaaagagaccgtgtacgcagtgctgctgggtaatggggatatttatgtggatcaatataaagaccatatatcagtccctatggataaggaatgaaggaacaatcaatcttaaagctccttattgaacgcaatggtttcaacttgtcttgggtacgaaatatgcagaagcccgtttaacagctgaatctgtaacaaatgagtttcagcggcttcgggaagctgaatgattcgctcaatttctccgtaataccgttcacgcagcacttccatttcggctggaaaaacaggcgtgatcgttcctttgatcagcagctgggttttagacagtaaacggatcgttaattcttcctcatacacaccgggcatttccacaatgataaaattatattcctcatcttgataaaagtcgtaaacaaacgtagaagcttcggaatcaaaaaaatgttccggggctttatatttgagcacatttgtccaaaagtcactttgtttatattcattcgtaatctcaagccactttcgaattttttcgaaatccatatgagattctccttaaatttgatttgaaatcggcgcagaagggtttccgatttggtcttggtcactaacgtctgaatcaatatttccagtgttcaaaagtgaagacgtaggcgaaagatcccctaaggaaaagtttgctccaaaatatttgctgttcgcagtatggctgttgtgcacagtcggaccgacatctatatttccgttttgcgtgacgccgttgatcttaatatttgcgatattaatttgatatggcatagacgaaacccctttaatctaaaattggcggtggtgcaatcggaggagcattaacgttggatgtatcagagttgccgatagatgtctggtcatttacatcaggatcgtttaagaagttttccattacggattctgtaggtgatgtatcaccgaaagaagagttggtcccttgagatttttgattgttggtagggctgttataagcagcttcgcctattgtaattgaaccattgcccgaaatactgttgatcttcaaataatataggttgattactgtagacggcatcccatcacacccttccatctttctgtacagtacattatgcgccgctgcacccaattgttccttgcatttacgggcaaaactctatctggccctggagtgatgctcgttagaaaaaaagaataaagtttgtcacagcctgaatgtcaatctatttggcaaatacttatcagtgaatgaaaagccattgatataggaagcaatgaattgattcagttattcgaaatgcatgagaccctttaataaagaaagctggcaaacaggatcagtttgaaattattgacaatgaagcaaatgccatgaaataatactcgtgagtaacattacttgcgagtattatttttgggggtggtcctcgttgaaaagtaaaaaaggacgtaaaggggaagaaagccggaaacggttactcaaagctgccgctaatgaattttcgattcggggattccatgacgcgaaggtaagtgaaattgtgaaaaaagctgggttcacgcagccttcattttacctgtactttcaaagcaaagaagccatctttgccgagttaataaccgattttcactctcgggtcaaaaagctgacagagtcacttcttctggaaaacggattaaacacggaggatgtgtcaaaacgggtactgctagctgtagagactgtttttcagtttttggctgaggacaaggatttaaccaagatcggcttttttctcaacccggaagcaaaacaaatgaaaaaagacttggcgatggttttgaaagagaacttagaagcagaacagcggcttggctattttcactctgaactggatatggaaactgtcgctgagtgtttggtcggcatgattgaacatttaaccgattcatttttgttaaccggaatcaaagatccggcaagcctcgcagcagaggttgtgaatcttttgatatacgggatgcttccgaaagggaatgacgtaagatgatatctattattctgaaagtcagtttggcagtttttatgcttgcgggaggcatcataaaggtaagccgcgttccctttcaagttgagcattggcggcattatcaatatccattatggtttctgactgttactggcattcttgaaatagccggggcacttgctatgacagcgggaatttggaatcggtatgcagcgattggagcaggtgttctgtttgtcgttctcatggcgggagccattcatgcgcatatgtttcgagcaagacaatcggtcatcatggcgataccagcgatgatttgtttgattgtttctatcatgatcatcatggggagttacacgtaagcttttcactaatgtttaagaacaagcccatttgcaggaaacctcctgttcttatcgaataatagaaagtccaggaattaactgaagcagtaaaatagagatccatttctgcgttattcgtccggcatcagctgggctttttttataaaggaggaatacaggatggcattaactttggaagacatgactgaggaagagttcgaagcctttcgcgggatgtccgtgcaaaattttgcgaaacaaaacataacttcaggaacttggacggaaaaagaggcatttgagaaatcggagcagacatatgagaacatgattccgaatgggcgagacagcaacaatcattatttttggaacatcacaaatgaccaaggggaaagaatgggctggctctggctgtacgctgatccgtttcatccgcaaaaggaagcgtttatctattcctttggattgtatgaagcctttcgcggaaaaggacttgctcaattggcgcttcaaacgcttgatgaaagagcaagagagcttggtgcggaaaggctggctctacatgtatttgcacacaacgagacagccgtctatctttatcagaagatgggctatgccttgaccaatatacgtatgcggaaacagctatgctgaaaagtcgcttacgttacccaaacacaagatgcctatctggaagcagtggcagggtactataagtcatcattagaaacattaaggtcatgggaaggcttgaacatataaagaaaaaaggacaacagctgttgtccttttcaatgccgcttgaactttctccctcagtcttttttgtcttgatgatccagctcttttattcgtttcgtaagctcattgaaagcctgatcaagctccttataccctttatcatttggcgtcataaaactgagctttcccagcacttcttgtctttctgtctcaagctttaaccgaagctcctcccgctcatttctttctgaaggagcgtcgtttaactgcttttcgatgccgttgtttgagatgacgagtttactgtttgttgttttttcgagaaagtatcggtcatgtgaaaccgccagcaatgtgccgctgtattgtgacagtgtttcttccagctgttcgcgtgacggcaggtcgagatggtttgtcggctcatctaaaatcagcacgtctttttcctccagaatatatgccatcagcttgatctttacacgctcacccatactcatatgcttgatcggttcagtccattggtcggctgtaaaacctaagtgcctcatcagattttgaacgtgcccccttgctttgaatgtttcattctcaaataactcttccggtgtttgttctaaaggcaaatcaaacacctcctgcgttaaatagccgatgtttgcggacggcgacacccatacgcttccttctgctgtttcctgtccaagaatgatattcagcaatgtcgtttttccgctgccattggggcctatgatcgcaaccttttcgccgtgctgaattgtaaagtttgcgtttttaaagagagtcctttctccaaacgcttttgttacattctgaacttctaaaaaccgtttccctgttttgtgggttgtatcgattgaaaagcggactgtatattctggggtaacgggttccgcctttgctttttcaagctctttttcaagccgcttctgcttggattttatctgggcatccgtacgcttcgcttttacccggtgatattctttaaacccttcctttttcgtcgattgagcatgggctttttccgaccaagaagcgagctcattcatttgtgcttcaatccgttcaaccattttttgctgcttttcatattcacgctgctgggtgagtcttttcttctcccggaacttcatatacccggagtaattccctttgaattcaatcagcgtctgatcctcaagcgaccatatttttgttgcggcttcgtctaaaaaatatcgatcgtgagaaacgagaatcacagtgccgttataatgtttcagctgttggatgagaaattgcaagcttttttcatcaaggtggtttgtcggttcatctaacagcagcagatctgcatcctctgatagtcctttcgccagccgcgcttttagtttttcaccgccgcttaactgatgaaaatcacgaagaggcacatgccatttctccagtaacttcttttcggcaggtgtctgatccgcaaaggaatatgccgctgtttcctgttcaaccaaagccagttttatatcctttcgaaggatttgaccctgggaaggggctaagtcattgtgaatgaggtgcagcagcgtagatttcccagcgccgtttttgccgataatcccaatgatatctccttgctgaacactggcatttatatttttaaaaacagtcagatccttcacttcatagctaacgtttgttaatgttacgatctctttcatccatatccctcgctttaaagggagaataaaaaaatcctcccaaatgtgttggaaggattagccgtgcctgtgcatgatcaaataagctattttttataaatagcaggtcgtatatatagaaaatgggcagactaatcctattttttgatttgaaatattgatttcaaacgataaaaataagattagttaatcattgtccacccatcatcccttcttgttttgattacaaacactatagcataccttcaaattcaaaagcaaaggtcattttcatcaaaaaaactcctgctctcatttttgaggcaggagtttcgagtgttattgatgcttcgcttttctcactttataaatcacaatcagcaaaataaaccaaaccggtgtgacaaataaggaaacacgagtatcctgtgccagtgccagcacaaccagaacaaacgccaggaacgcaagaatcaggtaatttgtaaacggataaagcggaagcttaaacttgtttgttttcgctaattcaggtcttgttttgcggtatttcatatggcagatgaccgtaattccccaaatgtagataaagcatacggttgaaatacttgtgatcagggtgaatacgccttctggcatgatgtagtttaacgtaacaccgattaaaatcacgatagctgaaaagaataaagcatttcttggcactttacgctgagtcagtttcgccattgactcaggcgcattgtgatctttcgccagggaatagaccatacggcttgtactgaatacagcgctgttgcatgctgaagcagcggaagtcaatacaacaaagttgataatacttgcagccccgacgatgccaaccgcgacaaatacttgtacgaatgggctttcgctgggattgatgacatcccaaggatagatgctcataatcacgagaagagccccgatataaaaaagcaacacacggacaggaatattgttgatcgccttagggattactttttcaggattttctgtttcaccggctgtaagcccgacaagctcaatgccgacaaaagcaaacacaaccatctggaacgagaggataaacccgtgcatgccattcgggaacaggcctccgtggctccagagatttgtgaagctggacactcctgagcttgtggaaaagcctttgaaaatcatcacaaggccaatgacgattaacgccaaaatggcaatgactttaatcaaagcaaaccaaaattctaattctccaaaaagcttgactgtcgccaggttcataatcagtaaaataattagagcgattaagccaggcacccattgcggcacacccgggagccaatattgagtgtagagcccgactgctgtcagatcagccatcgcaatggaaatccagcagaaccaatatgtccagccggtgataaatgctgccatatcgcctaggtagtcttgtacaaaatccacaaaagagtgatagttcaagtttgataacagcagttcacccagcgatctcataattaaaaagcaaatgatccctgtgatcatataagcaaataaaatcgaaggtccggcaaaatgaatcgatttgcccgagccgagaaataagcctgtcccaatggctccgccgatggcgatgagctggatatgcctgtttttcaagcctctctgcaacgtttgctgatttatattgtctttcgtcatgtcgtctgtcactttatgtgttcctccattgaaaattgtttattgagtcagcaatctatttttaatgattattataacactaaaatttctatcttttttactaaaaaaggattgatgaaaagaattttaatgtgatttggactatttcccgaaaaaagcggctccatttagggagccgcttttttatgctttttcagtttttgtcataaacaggtagagcccgtaatctgtcggtgcggatgcgtagcctgcctgccgcagcattgctgtgatattgccacggtggtatgtcccgtggttgacaacgtggggaagcagttcggaaacagttgttttcatgattccgcttgagggattctgaatctggagtggcttattgagctgttctttttgctgtaaaaatagtatatagcgctcggataacctcagaaaaaggtcttccatttcctctatttctttagcctctgtctgttctttaagctgttcagctaaagccaacgcatcgctcaaggttttgccggaaaacacttcaatccagccgagatcagaaagataaacatgagacaatacatgggatattgacggaaacacgctttgaatttcttgatggtatacctcttttggaagctcttttaatcggttgaatatttgttgattggcccagacgttatattcatacaatttgaatgcaaaatctgacatgttaaaattccccctttcgtgtgtatagcttccattatacacgaacatgagttcttatgtagagtgctcaaaaataaaatttgttgacatatatagtttagaggaataaactaattgacattgaacataaagtttagcggggtaaactataatgaggaggggaagatattgaatgaacaaaagctatgtcaggcgataaacctgtttgtggaagtcctgcttgaagggacagaatttgtacatcgtgaaatcaatcaggatgtcttcaagcatatctcaagggaacaggcagacctgttgaaaattttaaaagtcaagggcccaacctctcccggcagcctggccatgtaccaaaatgtacataagagcgcgatctctaacagactgaaaaagctgctcgaaaagggattggttcaatgggacgactgtctggaaaaaagtgataggcgctctaagcttattaacattacacccagtggtgaacacatactagaagaattagattctgccatctttaacgcgctcaaaccgctgattgatgatatagatgaggaacacttacattccatcatcgagatattcaccattttaaaaagcaaatttaaaggaggagattctgccgaatgagagcaatcatcaaattcaagtgggcaattgcagccatagtattagcacttaccgtcgttttgagtttgttttctccgaacttaacggagctggccaatcaaaaggggcaggcccagcttcccgctgatgctgtttcagaaagggcaaacgccattttaaaacaagcgggagaagacaataattcgatcagtgttgtctttacattagacaacgctataaagaaagaaacagagaatcagctccggataatgattgataaaatcaaaaagatcgacggtgtagaagaggtaacatctcctctgtcagcggaaaaagaagtcaaagaccagttgatgtcgaaagacaagaaaaccgttctcatgcctatcacgattacaggttctgataaaaaggcggaaaaaattgcggacgagatttatcaaatcgttcctgatgacttgacggcatatattacgggagcttcccttatcaaccaggatttcgctcacagctcagaggaagggcttaagaaaacggaagtgatcacagtctgcctgatcatcggtttactgttgatcgtgttccgatctgttgtgacgccttttatcccgattgtggttgtcggtttttcttatctgatcagtcaatccatactgggcatccttgtatacaatgttgattttcctatctcgacgtttacgcaaaccttcttagtcgcgatcttgttcggcattggaacagattactgcatactgcttcttacacgattccgtgaagaattggcaaacgggcatgataaaaaagaagcggcgcttatcgcttaccgtacagggggaaaaaccttatttatcagcggttttgcggtattgatcggattttccgccttaggatttgcgaagtttgcgattttccaatccgcagtaggggtagcagtcggtgtgggaattttaatgattatcctctacacactgctgccattatttatggtgacgctgggtgaaaaattattctggccttctaagaaagtgctgtcacacagtgataacaaactatgggcgtttctcggcagacactccgttgcgcgtccgtttctgttcattgtcatcacggtggtgattacgcttccgttcatcttgacctatgatgaccagatttcattcgactcaactgcggaaatcagcagcgattataaatctataaaagctctcgaggccattaaggatggattcggggaaggaaaagcgttcccgatcaatgttgtcgtaaaaggagacaaagatcttacaacagctgatacaatcccctatctaggaaatatcagcaaagcgatcgagaaagttgatcatgttgactctgtgatgaccattacgcagccgactggtaaaaaaatcaaagatttatatattgataaccagctaggatcggtttcagacgggctggataagacggtaaaagggattgccgatgtccaaagcggattaacggatatagaaaacggactgaatcaaatggcagggcaaaccggctcggcctcaaatggagggtctggcggttcactgggcgatgcggcagatggcttgggcaaaatcaatcagcagctgcagctcgtgagcaaacagatttcccaaaccggcaataccgcacagaccgtgcagcagcttacggcaatcagcggacagcttggccagattcaaaccggtcttgaacaagcgaaccagcagctctcaggccagcaggcacaagccggaacgctgacagaaagcctgaagaagctgtccgaaggcgtgaaaagagcaaatcagggcctgacgaaagtctctgacggtattacagcttccagtgatatgttagaggatatgagcaaaagttcaactgtaagagatacaggcatattcattcctggtcaagtaatgaaggacaaagactttaagaagtcaattgaccagtattcctttgcagacggcaaaggtgttcaattaagtgtcgttctggattcaaatccgtactcagaacaagctattacgacaataaaccaaatcaaaaaagctgtcgcaaacgaagttgacggcactcctttggaggatgcacagatcgtatacggcggggtcacgagtatgaatgcggacttaaaggagctgtccacaacggacttctccagaacaatggtgattatgattataggcctgtttatcgtgttaaccattttgttccgctcaatgatcatgccgatttatatgatcgcgtcattgctgctgacgtactatacgtcgatatccataacagaattaatttttgtaaacggcttaggaaacgcgggtgtcagctgggcagtgccattcttcagctttgtcatcttgatcgcgttaggggtagattattcgatcttcttgctggatcgatttaaggaagaggtgcaccttggcattgagcaaggtgtcgtcaggtcaatgagcaaaatgggatctgtcattattacagctgccattatattggccggtacgttcgcggcgatgatgccttcaggtgttaatacactgatgcaggtggcaagtgttatcatcatcgggctcttgctttacggccttgtcattcttccgcttttcatcccggcaatcattgcgacctttggagaaggaaactggtggccgttcggcaggaagaaaggaaaagagtaatcgagagaagagtgatgaatggtcatcactcttttttcatgatctaaacgacgaacttcagacgtgttacccaaaaaaggtcagacgatcaaacggcggctgggtacttaaaaacaaagagcccggaaaacattcccgggctctttgttttatttccattctgcaattgtatcaatcggcagacggtaggaagcatagccttcgtctgctgcttttccgatagaaagtagcataaccggtacataacgttctttatctaatccgaaggtttccgcgatgttttctttatcgtatccgccgatcgggtttgtatcgtagccatgcgcgcgtgcagtcagcatcagctgcatggaaacaagacctccatcaatcaggatcgtttcacggttgacctgtgccggaagcttttcaaaatgtgcggtcagcgcggcgatttgtctgtctttgacctcctgcggcatgtaaccaagttccacggcttttgaatagatttcttctaagtagtctgcattgttcatgtctgcaaatacagcgatgacagcagatgatgttgtgacctgtgtttggttaaagcttgcaagcggtgcgagcttttcttttccttccgggctgtcaatgacaagaaaacgccatggctgcgcgttaacagaagatggggcagttgttgcttcctctaagatctctgtcatttcttctttgctgatttttactgccggatcatagttgcggatagaacggcggcctttcataatttccataaaatcgtttgttttgatcatgttgatacactcctcttaagcttcgatattatttatattgtttcgcatgcgcgccagcacatcaatgagcaggcggcgttcttctgcgcttacatttgcgagcatttccttcatgaaacgctccttttccttcttagaagactcaattcgctctcttccttggtctgttaaccgaacaagggtgatgcggttgtcctcaggcttgcgccgccttgataccatgcctttggcttccagctgtttcaggtgtctggtaacggctgcgctatcgatatttactttcttttgaaggtcgctttgactgatctcatctgcatgataaagcaatgtcagcaattccaaacgagattggctgatgcccgtgcatgcctcgaacttcacgccaatcaccttgttcacgccttgcagctgatataaaatctcggcttcctctgaacaaaatgacgccaaaacccatcccttctttcctgtcaaaactattaattgatatatcaatgattgacacgtcaattaatatacaacgattgatttcatcttgcaagccatttgcacttttgaacaacctcccagcgcataaaattcgctaggctagaacttagcaaaaaaagctggccgcttcttcagatgatgctggtcacgatgattccctgcatcattcccatttataggtgttcggaatatcactttgccgagcccgtgctcaagcggctttcacaggctgaaagttatgatacaatatacaaatgtttcacagcttcaatccatagttggagctgacatccattatataagggactaggttgaagggaaggtttgataacatgctgcacaatccaactggaaaagaacgcttggcactagcgtttctgctcggcatgcttgctatattgggcccgcttaatatagatatgtatttgccaagttttcctgaaatcgcgaaagatttatcagcaagtgcttcacttgttcagttaagtttaacagcctgtctggtcgggcttacgatcggccagctgattgtcgggccggtcagcgatgcgcagggaagacgaaaaccgctattaatctgtatttttttatttgcgttatcttctctgttttgtgcactgtcgcccaatataacaactttagtggctgcgcgttttttacaaggcttcactgcttctgcagggcttgtgctgtctcgcgcaatcgtccgcgatgtgtttaccggaagagagctttctaaatttttctcgctgttaatggtcattaccgcggtggcgccaatggttgcgcctatgacaggcggtgccattttgcttttgccgttcgcaacgtggcatacaatttttcacgtcttaatgatcatcggatttttactagttcttctgattgcattgaggttaaaagaaacgcttccgctggaaaaacggattccaagctcaatcggaacatccgtcaaaacgatgggcagcctgctgaaggatcgatcctttatggggtacgcgttaactgtcggatttattcacgggggaagctttgcatatgtgtctggtacgccttttgtataccaggatatctacggggtgtctccgcaggtatttagtattctttttggcattaacgggttggcgattatatcgggcagctttatcatcggacgctttggcggaatcattcatgaaaaaagcctgcttcgtatagcggtcattacggctatgattgcgacggctgtgctattaaccatgaccatgattcacggtcctcttgctacattagtcatatccattttcatttacatgattacgatcggcatggttctgaccagcacgtttaccctagccatggaaaagcaggggcaccgcgccggaagtgcaagtgcgctgcttggaatgcttccgctgctcctcggttcaatcgtgtcaccgcttgtaggcattaatgagacaacagccgttccgatgggagccatcatgtttgtgacagctgtcatcggctcactggcgttttttggattaacgaaagaacgagtagggcagaattcataaaaaaacctgacatgacgtcaggttttttgttttatttagaataacaacagcaggcctgcaatcgccggagtcaaaaagatggctgatttcaaaaccacctttggcatgaggttggtgaatttcgcgcctacataggccccgcacattgtcccgaccagaactttgacaagtaaaacgtaatcaacaaaaccttctgtaatatatccgatgcctccacctacagccagagggatgatcacaagcatcgtcgttccgacagaatggcgaatggacagattcagcataatcattaaaccgatttgaataaaaggtgccgacccgatgccgaatgtgccggaaagaacgccggctgcaattcctaagatgaccgctctcgtatacgttgaaagagtgctttgattcacttgagccttctcttttaaaataaataatctgattaaaatgagaattgctgataaaaataacattccagccgtcaaataatgaagcaaatcagccggaataaaagaagtcagcttggcgccgaaaaatgagccaaccgcagcaaagcctccgactattaagccgattttcatttgaatgttaccctcgcgatagtggctgtatgcccctgataagcttgtaaaagccatgccggcaagcgaagtgcctaaagccgtatgaatcgggatatggaaaagaagcgttaaaagggcaatgacaaagccggctccaccggcgccaataaagcctaaaataattcctagaagaaacataacaagaataatgagcatattttttcctccattgaaaagatgtaaaaaatgtaatcgtgcgctattctggcggaggtatggtgtcctattgacgaagaaaaacacgccgttttttcagttgccagtagtccgtcgaccgtcgttcagcaaacatatcgtacctcaaattctgggatctgacaaggcagtttgttgcttcccattaccatctgttatatgattttgatgaagaaaagcccttgaatatattcaaaagaggtattatatatggacgattttaaattagataagccgactccctactacctgcaattttataaccagctaaaaaaaatgatcttcaacgggacttttaagcctggggaacggataaacgaaacacagctggcgaaaagctttggcgtcagccgctctccgataagggaagccatgcgattgcttgagaaagatggtttgttaaaagcggatgaccgaaatgggttttcgatcacgtcgttaacggcaaaagatgtagatgagatttataaaatcagaattccgctggagcagctggcagtcgaattagtcatagacgaagcggacgaagaagagctgaccatactcgaaaaacagcttgaagaaacagagaaagccattcacaacggcacggaagatacggaaatcattcgtttaaaccaaaaatttcatgagctgctggttgatttcagccataacagacatttgaaaaatttgcttgagcatgtaaatgacctgattcatttttgcagaatccttaattataccggcgaccaccgtgcagaaacgatactgcgtgagcaccgcaggatatttgaagaagtgaaaaagaaaaacaaagaagcagccaaacagcatgtgctggctcatttcaatcatgactgtgagcatttgaagcatgtgcttgaagaaggtaaagagaattgatttgtatgatccggtaccaagggagagcagaacccttggtatttttttatgtattcaccacatatctaagaggccccgttaataagattttatgatggtttgactaacgaataatgggggttaaacatgtttatccatatcgtcgggcctggtgattctttgttttcgataggcagaagatacggtgcttctgttgatcaaatacggggtgtgaatggtttagatgaaacgaatatcgtgccggggcaggctctgcttatccctctttatgtatatacagtccagccgagagatacgcttaccgccattgcagctaaagcgtttgtgccattagagcgactgcgagcggccaatccgggcatcagcccaaatgctttacaagcgggagcaaaaataacgattccttcgatctcaaattacattgcggggacattgagtttttatgtgctccggaatcctgacctcgatcgggagctgatcaatgattatgcgccatactcgtcttcgatttcgattttcgaataccatattgcatcgaacggcgacattgcaaaccaattgaatgatgcggctgctattgagacaacttggcaaagacgggtcacgccgctggcaacaataacgaaccttacatcaggaggcttcagtacggagattgttcaccaagtgctaaacaatccgacagcgagaaccaatctggtcaacaacatttatgacttagtttccacaaggggatatggcggtgtcacaatcgattttgagcaggtgagcgccgcggatcgcgatcttttcactgggtttttacgccagctgagagatcgccttcaggcgggagggtatgtgctgacgatagctgttccggcaaaaacaagcgataatattccctggctgagaggctacgattacggggggataggagcggttgtcaattatatgtttatcatggcttatgattggcatcatgccggaagtgagccgggtccagtagcgccgattactgaaataaggagaaccattgagtttacgattgcgcaggtgccgagcagaaaaatcattatcggagtcccgctctacgggtacgactggatcatcccgtaccagccgggcacagttgcttcagcgatttcaaatcaaaacgcaatcgaaagagcgatgaggtaccaagctccgatacaatattcagccgaatatcaatcaccgtttttccggtacagtgatcagcaggggcggacgcatgaggtatggtttgaggatgtcagaagcatgagccggaagatgcagatcgtccgcgaatacagattgcaggctattggcgcttggcagttaacgctgggctttacaccgggcccatggcttctgcggaaattttttacgatcagaaaagtgtaaaaaaagacaccacaactggggtgtcttttttttgattaagtccagagcagcagaatagttcattcatttgtaccttgcataggttgtgttcccattttacgattagtagtagtctgatcaaacaaagagtcagaatacgatttgagagggagttgtctacatgaagacagtattgattttgaattttcctgcggaaggccatgtgaatcctaccttaggcattacaaaagcgttttccgataagggatatgatgtccattatatatccactgaaaaatataaaaaacgattagaagcagcgggagcaacggtccatcttcaccgggatctgctgcgaacaacacctattcatgtcggttcgcccaatggcattcttgatttcgtgaaaatccatatcaaaacgtcattggacattttacagattgtcaaagacttatctaagagcattcaatttgattttgtttattatgataaattcggcgcgggggaattggtaagggattacttagatattccaggagtctcttcatcggcgtctttcttgtttggcgaggagcacctgaaaatcctgccgctgcatccggagtctggagcgccgcttgaattggatcaagagtgtgaagatcttttggcaaaaatgaaagaaacgtacggtgttgccccgaaaaacctggttcaattcatgaacaataaaggggaattgaacgtagtgtatacaagccgttattttcagccagaaagtgatcgtttcggggatgaatgtctgtttatcgggccaagctttccaaagagagcggaaaaaacagatttcccgattgaacagctaaaagatgagagtgtcatttatatttcaatggggactgtactggatcatacagaggatttcttcaacctttgtattgatgcattttcaggctttaacggaaaagtcgtcatcgctgccggagaaaaagcggacctgaccaaattaaagcaggcgccggaaaactttatcattgctccgtatgtccctcagctggaagtgctggagcaatcggatgttttcattacacacggcggaatgaacagcgtaaacgaaggcattcatttcagcgtgccactggttgtcatgcctcatgacaaggatcagccgatggtggcgcagcgtctctctgaactccatgcaggctatgtcatctctaaagatgaagtcaatgcccaaatattaaaacaggccgtagatgaggttttgcgcaaccatcagtatacggcaggcattaaaaaaatcaatcaaagcttcaaggaatgtatggacatggaagaagtgatggagcgggttgatgagttgattcgccaaaaaaacaaataagaaaaagaactcccgtaccttgtacgggagttcttgatttaaaacttgattttgattttttgagcatcactgattttcttatggttatggtcaaagacgtcacttgtcgtgatttcgatccacttgatctcttttgttttcttctcagcatccgcggccttatcatgagcatggcggcttgatgcgttcacaataaagccgagatttccagacttttcggcgccgccttccaattcgccgtttaactcttcaagataaatatctttgttccaatcaaaggtttcgcccgtatttgttttcatcaatgcaatcggcgcaacatttactttttttgaagaggtgttcttgatatcaacgaaaaccttaacgaaatcaaactcttcatcgtgtgttaactcatgaaagtaatcaatcatgctgtagtccgggcgcaagtggatcagcttcatttcttttactgttaactccacgtcgccaatcttataggttttgttcacttgtttgatatcttttaagacagcttttcctttatcatctgaaaacgtttggccgaccttaagcaatgaccggtcatcagttacctgggaattaggctgataattatctgtgctgtccttctgggatgaagtgctttgcggctcagcttttactgttttctccccgcctgcatgctgtttttcagtactggcgtttgatgagcagcccgcaagcatgatagcaaaaacgaaaattgaaagaattcttctcatgatgattcctccattaaaaagagatcccgttacttcatacaagcaacgggacaccttgtaatcttttacttatcgttaatcttaatgttgtattgtaaagccttgaagacatttttggcgatttctgtattgtcgatttggccggcaaatgtctcactagacggaccgtatgcatagacgggaacatcttcaccggtatgtccgcctgttgtccatccagtgtgagagcgtttattaaagatgttctcgattgcgttatcgatatccagtacttccttcgattttgccgcttcttcaacagattgaatttcggcttttgttaaagccaatttcttttgatcgatatatgttttcaaagttttttcaacatccgcgccgtcagagatcttttctgccataaagtcaggtgtgcgctttgcggctttaatgggttcactgaaccagttgtagatgccgtccgcaccgatggaatatccgccggttgagtggtcagccgttgcgacaaccaatgtgtgcttgtcttttttagcgaaatcaatagccgccttataagcttgttcgaagtcttccatctcgctcatggcaccgacgatatcattgtcatggcccgcccagtcaatctggctgccttccaccatgaggaagaatccgtctttatccttgtttaattttttaatggctgtgtttgtcatatctttaagtgatggaatatccttcgtccggtcaatctttttaggcaggccgccgtcagcgaataggccgagaacttggctgtctttatttttcagcatgtccttgcgatcatccacgtagctgtaccccgcttttttgaattccttgatcaaattacggtccttacggtcaaaattgctctttcctccgcctaaaaggacatcaattttgtgcttgccgttgaccatctcatcaaaataatcatccgcaattgagttcatattttttcggctatggtcgtgtgaaccaaaagaggccggagtggcgtgtgtaatttctgaagtggccacaagtcctgttgcttttcctttttccttcgcagcttcaagcaccgttttggcttctgacccgtcgttatcaacggctatggcattattgtatgttttaattcccgcagacatagccgttgccgccgctgcagaatccgttacattttgttcaggatcatcgggataagttgtttgctggccgacaagatactgatcaaaagccgtaggctccacaacttttgtctttttattatcctttaagtatcgataagcggacgtataagacacacccataccatcaccaatcagaacaataacattcttaatttcgtcttggtttccctttttcttttcctgggcgctggcatcaggcacactgccgctggctaagctgctgaacgcaattgatgataaaaccgcgataggcagtaatttcttcgggaattttttcaactggataacctcctaaatatagatgaatctcaatgacaacccaattatatttttaaactgttaagctagtattaatcgattttaaagattggatttacaagaataatgaactgctatcaagagaaaggaaagagtgatagtactatagaaataaattggaggaatagatactggccgtggataggcggactgaaatctgctatagtcgcatagaagcaacccgcttacatctggaacaattttaagtattatgttggaaagaggtattgtgtaagcacatgtctgagcagttcatatggagtggcatcattttattttaggagggaacaacatggacgttttttctgagtatttagcgggaattgatgacccgttccaccgagaaagaacggaagaggtgttaacttggataaaaaataaatatccaaatttacatacagaaataaaatggaaccaaccgatgtttacggatcacggtacatttattattggctttagtgtttctaaaaagcatttagctgtcgctcctgaaaaagtaacgatagcgcacgtagaggatgatattgtgaaggctggatatgattacaccgagcagctgatacgtatcccttggaatggtccagttgattacacgctacttgagaaaatgattgagtttaatattctggacaaggcggaatgctccactttttggcgaaaatgaaggaaaaaggcataacatatgagctgtataaaatatgttacgccttttcatttgtctatttttcgttttgatcatctattgctgcttttcttcaaacaaggtcatttcattgagcgtaagctggctcgcagaataatgattaccttgtttccatttcacttcaatcgtaatatcatggccttcaagctcatgttcatctaaccgctctaaaaaagaaacggacttttcctttgcgcttccatcacgataagtgcctccagcataatcatgcatcgggatttccgtgtcagaactcagcagaatttcatcatccttttttacaatcagtgattccaaataagtgttgtctgtttcatgtggttcaccgatccaataaagttcgccgctgtattcattcggtgcatcttcattttttttgaaaacagcttcccaattctggtctttgctttctccctgccaattcggatactccaaacgaacatgatgaatcaggtgataggaaaaaaagatcaagcagagagcgattaataggaatgccgtgaaaatgagagggtatttataatgactggacataaaagactcctattcgtttaatcaattaccttcgaaaatagaatttcatcccgaatcaaaatgccgttttcagccacctcgggaatctccggcttgagtcggcgcgctttttcaactgcgttcggaaacacttcggcgaattgatagcctctcttttgataaaacgccatcgcatgtacattatcattcgttgtaataagctttattcgttgacaatgtgcatatttagccgtctcttcaacctgctggagtaaagctgtgccgattcctttattttcaatcatactatctaatgaaataatttcacaatctttcccatctatcaagtatgtaatacagccaatgatttcgccgctttcatttactgcggcaaatccatctaattcatcacaccgaaaaatgccgctggaaatcgccatctcgggtgtaccccaatgcttggcaaaaaaatcggtcaacatctgtttcgctatctcattgtttgggatgatcatcatcataacactcctctattgaaagattgcatatgtactatcaatataaacaatatataacaaaaaaaatagatgttgaggtgacggcatggaaatcagcgatgtcatttacgggcaccaccatatagacggagtgctggaagagcttatcaaaagcgctcctgtgcaaagattaaaagggatctatcaaggcggagcaagctttttagtcaatcgaagatggaatgtgaccaggtatgagcactccatcggcgtaatgctcctcatcaaaaagctcggaggaacgatagaagaacagattgcaggtctgctccacgacgtatcacacacagctttttctcatgtggtcgacgttgtctttgaaaatcaagcagaagactatcatgaaaacatctttcaacaagtcattgttcactctgaaatcccggacattttacaaaaacacggctatcatactgaagaacttttatctgacgattcaaggtggacattgctcgaacagcccgcaccggagctgtgtgctgatcggacagactatacgctgcgtgatatgtaccgatatggacacattaacctgcacgaagcgcaaacctttttggatcatcttattgtgagaaacggaaggatgtttcctgatagtattgaagccgccgaatggtttgtcagtgtgtactacaaggaagtaattgatttctttttgaatcctgtgaatgtatatggatatgaatatttagcgcgagcattgaaggcagcgctgcggcatgatgtcatatctgcagaggatctgctgaaaacggaccaagaggtactgaacatcctgcgtgcatcaaaaaatgaagaagtcctgagcttgcttacatccattcatcccggcatacaagtaatagaggatgacatccagtacgatttccatcaaaagaagaaaatgcgcctaatcgatccatccatttttcttgatgacaaatggatcaaatcctcagatgtttctgaaaaggtgaggaaaatgggtgaggccgcttatcaaaaagcaaaaaaaggtgtgtatataaaaatcttaaatcagtaattgccgcctgacagcggctttttttatgtttggctttgcaaacaaaggggaataggacaaactgcgggaacgcattatgagaatatcagcgtatttacataccgttcgggggtatagtattatcgagagggcatgttttcattgtctgcgggcaaaagttacaggaaaaaaatgaagcaaaggagaatgaacatgaaaatctctaaaaatgcactgggaattctgatgttatctcttgtttttgttttatcagcatgcggcaataacaacagtacgaaagaaagcacacatgacaatcattcagactcctcaacacatgaagagatggaccattccggatcagctgacgttccagagggattacaggaatctaaaaatccgaaatacaaagtaggcagccaggtaatcatcaatacttcccatatgaaaggcatgaaaggtgctgaagctacggtaacaggtgcctatgatacaactgcgtatgttgtttcttatactccgactaatgggggacagcgtgtggatcatcacaaatgggtgatccaagaagaaatcaaagatgccggagataaaacgttacaacccggagatcaggtgattttagaggcttctcatatgaaaggcatgaaaggagcaacagccgagatcaactccgcggaaaaaacaactgtatacatggttgactatacatcgacaacaagcggcgaaaaagtgaaaaaccacaaatgggtcacagaagatgagctttcagctaaatcataaaaaatcctccttttacaaggaggatttttttgctgtctgaacaggtcttgttaaagaaatgaaagcaaacaggacagcgatgatcacaattgacccgccgcaccatgctgttgacaccacagtacccgtttgatccaaaacaacaccgccaatggctgagccaagggcaattccgacttggagggccgatgtgttaaagctttgctgaatgtcagacgaatcaggtgcaatttcaattaaatagctttgctgagccggggcgaggctccagctcagaagaccccaaatcaccatcacaggcaaaaagaaaatcatagacgatgtagacagcggcagtaagaacataatgatagcaaaggaaccggtcaccagcaaaatgctcttaaaggaaccaagccggtcagatagcgctcctccgaaagggcctccgcatacggcagatatcccgaaaaggaaataacaaatgctgacccagaaagagctcaggtgaagagtctcttctaaaaacggcgcaaagtaagcgtatagcgtgtagtggccagctaatgtaaacatcgtgacgaggtgtgaactcgcgattttcagattaccgatcgtcttgagctgttcccggaaaggaatcattttctccgccggtattctttcaaagaagattgaaataatcagcatggagatcagcgccaacaggccgatgccaaggaacaaaatccgccacccgaaggaatcgctgattaagattccgagcggcacacctaatgcgatagcagagctgaaacccataaaaataattccgattgcgcgggctctgtattcaggcgctacaattttcggggcaatcgttaaagaaagtacaacaatcagccctgtactcatcgccgccaataccctagataccatcaatgttgcgaaattagggctgaagtaggcgacaagattgctaaggaagaaaacaaataaagcaattagatataagcgcttccgctcaatcttcgcagtcaatgccaaaagcagcggcccagatactgcatatcccagcgcaaacacactgatcagctgtccggctgaaacaatggaaatgtctaaatcatttgcgatctgaggaagaattccccccacaattaactcaaccaatccgactgcaatcgtagaagctgcaagcaggaaaactttgaaattcataacaaactcctttacttaaatgttttgataaataaaaaaaatcctgattacaaaaaatgtcataaacaaattttgtaatcaggattttacggttcctggtagacaccctcaaaccatattattgaggttatacaagtgttaatagctatttaattgattcgtttccgttgatgagtgtaccacattatgaatgaatcttccatagaaaatttacaaagtaatgaaccggacaagtgtatgattatatttattttataaaagtatagacatttaaaagtgaatgactataataatcaatgtaagcgttttaattacaaggggggatagcagttgaaaaaaatattactcgcgtgcagttcaggaatgtctaccagtttattggtgacaaaaatgaaggaatacgcacagtctatcggtgaggaagcagagatttgggctgttggccaagataaggcaaaagaagacatgagaaaagcggatgccgttttgatcggtccgcaaatgagctttctgaaaagcgagctccaaaaagaagcagatcaatacaacattcaagttgaagtcattgacatgatggcctacggaatggcagatgggaaaaaagcgtatgagcaggcattgtccttaatggtgaatcaataatggaacagatgaaaatcacgaatttaacagacgagcaaatcagttttcagctaatcctgcacagcggaaatgcccgaagctgcatcatacaatcactgcgcgcctataaagaagggaacaaggacgaggctgatgccctcattgccaaggcggagcaggatttatccgcggcccatgacattcactttcaaatgatacagaaggaatccggcggagaagcaacagctttttcattgctgcttatgcatgcagaggatcatctgatgtcaacattatccatgaaagaattagtgaaagagatgcttgatctctttaaaaccaagaatatataaaaaataggggtggatagggtgttcgagaaaatcagccaattccttgttccaattgcagggaggttaaacaataaccgctatttgcaagtgttgcgtgatgcatttatgctggctttcccgctgacgatattcgggtccatttttgtcgtgttaacgaatttgccgtttctaaacaaaatcatgaacgcctcaatgcttacgtcgtttcagtctcatttcggcattgcctccacggcgacaatgggcattatgtctgtctttgttgtgttcgggataggctattacctgtcgaaaagctatcaggtcgaagctgtatttggcggagcgatcgctttggtttcctttttgctcttaacgccatttatcattcagccggaaacaggtgatgccattacaggggttatcccggtcgatcgtctcggtgcaaaagggatgtttcttgggatgattacggcatttctttctggcgaaatttacagaagaatcgttcaaaaaaacctgacaatcaaaatgccagccggcgttccgcctgctgtagcaaaatcatttgccgcacttattccggcttttatcacattgaccgtatttttgctgattaacgtaatggtgactctgttttttaaaacaaatatgcacgacgtcatttatcacgcgattcaggctccgcttgtcggacttggaagcggtatcatcccaacgctgattgccgtgtttttcattcaaattctttggtttttcggactgcatggacagatcattatcaactccgtgatggacccgatttggaatacactgcaggtagaaaacctttctgcttacacggcgggaaaagaaatccctcatattatttcaaaaccgtttatggagatttatacagtagggatgggcggaaccgggatgacgcttgcggttgtgtttaccattctcatattcatgaaaagcaggcagatgaagcaagtatcaaaacttggcctcgctcccggtatttttaacgtaaacgaaccgattatcttcgggcttccgattgtcatgaatccgatcattattgtgccttgggtgctggcaccgatggttgttacgctcgtcacctatctggctatgtcagccgggctcgttccgcctccgactggtgtgacggtgccgtggacggttccattattcattaatggcatcatggcgacgaactcaatcatggggggcgtgatgcaacttatcaatctgctgattgtcttcgtgatctggtttccattcctaaaagcaatggataaattaaatctggcaaaagaaaaagaacaggctgtgcaggaaacagctgctcagcaaaatgataacagcataaaaatgtgacataaggggagagagacttggcacaaacagaacaatatcgttttccaaaggatttttggtggggatcatcggcttcagcaacacaaacggagggtgccgccgacagagacggaaaaggccagaatatatgggattattggtttgaaaaagaaccgcatcgtttttttgatcatgtcggacccgcagacacatcccaattttacgacaactataaagaagatatcaggctgatgaaggaacttggccacaactcgttccggatgtcgatttcctggtcgcgtttaataccaaacggaacgggcgagatcaacgataaagccgcaaatttctataacaatgtcattgatgagttgatcgctaacggaattgaaccttttgtcaatttgtttcatttcgatatgccgatggcgcttcaaaaaatcggcggctgggtcaacagagagacggttgacgcgtatgaaaactatgcaagaacttgcttccgtttgtttggcggcagagtgaaaaaatggttcacgcataatgaaccaatcgttcctgtagaaggcggatacctatatgattttcattatccaaacaaggtcgattttaaagaggccgtccaggttggatttcatacgatgctgtcaagtgcccgtgccattcaggcttacagggagatgaagcaggacggaaaaatcggcatcatcttaaatttgaccccttcatacccgagaagcagccatccggcggatgtgaaagccggggaaatcgcagacgcgttttttaacagatcttttttagatccatctgtcaaaggcgaatttcccaaagagctggttgacattttgaagcatgaaggctttatgcctgattacattcctgaagatcttgacatcatcaaaaagaacacggttgacctgttgggagtgaattattaccagccgagacgtgtgaaagcgaaagaacatcttccgaatcccgacgctccttttttgcctgacaggtattttgatccctacgtcatgccgggccgcaaaatgaatccgcatcgcggctgggagatctatgaaaaaggcgtttatgatattttgatcaatttaaaagaaaactacggaaacatcgagtgttttatctctgaaaacggcatgggggttgaaggtgaagagcgcttcagagatgaacaaggcatcattcatgatgattaccggattgaatttataaaagagcacctcaaatggattcaccgcgccatacaggaaggctcgaacgtaaaaggctatcacttatggacgttcatggacaactggtcttggacaaatgcctataaaaaccgctatgggtttgtatcagtcaatcttgagaaagacggagaaagaaccgtcaaaaagagcggaaaatggttcaaaacagttgctgagcatagcggtttctagattttcctaaaggtcaagatcttccggcaatcatcataacgaatagagatgacgaaaatccgcaacattgatgaaatagggaaaagaacttatgatatccgtaaaagcttatgtgatatcagactctaacagctgccggaggatgccaatgaataaatacgaaattattgcaaatgaaatgagaaatagaattaaaaataacgtatatccgatcgatcagcccattcctgatgaagtatctcttgcaaaagaatttaactcaagccgcatgacgatgaagagagccttggataatttagttgctgagggtctgctgttcagaaaacgaggccatggcacgtttattattcaatctgcaatacaggatgaccatgtacatgtagtcagcaatgagattctcggattgaccaacttgctgaaagataaaaaaatccaaagcaaggtcattcagtttgaagtgcaatttcccactgaggaagtggccgcccatttgtctattgatcaaaaaacaccggtttattatgtcgttcggcttcgaattgtagaaggtgaaccctatgtattagaaaaaacatatatgccgactcatttaataccgggcattaatgacgatgtacttcatgattcgatctacaatcatattacaaatgtgctgcagctcaaaatcgccggaacgcatcggaaaatcagagcctgcaaatctgatcatattgaccagcagcatctgggctgtaaacaggatgatccaattctggaagtggaacatgtgggcttcttagataccgggattccatttgaatattccttttcacgtcatcggcatgacaagtttgttgtgacttctgtaaacatacggcgctgattgcggagacaacaaggaggccatctgcatgcttggcggtattgaagcaggcggcacaaagtttgtttgtgctgtcggtagagaagatggaacgatcattgacaggatagaattctccacaaagatgccggatgaaacgatagagaaagtgattcaatattttcgccaattttcattacaggcaatcggcatcggctcctttggtcccgttgataacgataaaaccagtcaaacatacggtactattacggccacgccgaaagcgggctggagacactatccctttttgcaaaccgttaagaacgaaatgaagatcccagtcggatttagtacagatgtcaacgctgcggcgctgggtgaattccttttcggtgaagcgaagggtcttgacagctgcctgtatataacgattggcactggcatcggagcgggggctattgtagaggggaggctccttcaggggctgtcacacccagagatgggccatatttatatccggaggcacccggatgacgtataccaagggaagtgcccttatcatggagattgctttgaaggcttagcttcaggccccgctatcgaagcccgctggggaaaaaaagccgcggatttatcagatatagcccaagtctgggaactggaagggtactatattgcccaagcgctggctcagtatattttgatccttgcacctaaaaaaatcattcttggcggcggcgtcatgcaacagaaacaagtgttttcttatatctatcaatatgtaccaaaaatcatgaacagttacttggatttttctgaattatcagatgatataagtgattatattgtacctccacgtttaggcagtaacgccggaatcatcggcacgctagttttagcgcatcaggccttacaagcagaggtagcatccggggaggtgcgatcatgacgcatcctttatttttagagcctgtctttaaagaaagactatggggagggacgaagcttcgtgacgcttttggctacgcaataccctcacaaaaaacaggtgagtgctgggccgtttctgcacatgcccatggcccgtcggctgtaaaaaatggcccgctggcaggaaaaacactagatcaagtatggcaagatcatccagagatattcgggtttccggatggtaaggtgtttccgctgctggtaaagctgctggacgccaatatggatctctccgtgcaagtccatcctgatgatgattatgcaaaactgcacgaaaatggcgaccttggtaaaacggagtgttggtatatcattgattgcaaagatgacgccgaactaattttgggacatcatgcaagcacaaaggaagagttcaaacaacgaatagaaagcggtgattggaacgggctgctgaggcgaatcaaaatcaagcccggagatttcttttatgtgccaagcggtacactccatgctttatgtgagggaacccttgtccttgaaatccagcaaaattctgatacaacgtatcgcgtatacgattatgaccgctgtaatgaccagggccaaaaaagaactcttcatatagaaaaagccatggaagtcataacgataccgcatatcgataaagtgcatacaccggaagtaaaagaagttggtaacgctgagatcattgtttatgtgcaatcagattatttctcagtgtacaaatggaagattagcggccgagctgcttttccttcatatcaaacctatttgctggggagtgttctgagcggatcaggacgaatcataaataatggtattcagtatgaatgcaatgcaggctcacactttgtcttgcctgcgcattttggcgagttttcaatagaaggaacatgtgaattcatggtatctcatccttaatgaatgggggagttgcatttgtttaagaaacatacgatctctttgctcattatatttttacttgcgtctgctgttttagcaaaaccaattgaagcgcatactgtgtcgcctgtgaatcctaatgcccagcagacaacaaaaacagtgatgaactggcttgcgcacctgccgaaccgaacggaaaacagagtcctttccggagcgttcggaggttacagtcatgacacattttctatggctgaggctgatagaatccgaagcgccaccgggcaatcgcctgctatttatggctgcgattatgccagaggatggcttgaaacagcaaatattgaagattcaatagatgtaagctgcaacagcgatttaatgtcgtattggaaaaatggtggaatccctcaaatcagcttgcacctggcgaatcctgcttttcagtcagggcattttaaaacaccgattacaaacgatcagtataaaaaaatactagattcttcaacagcagaagggaagcggctgaatgccatgctcagcaaaattgctgacggacttcaagagctggagaaccaaggtgtgcctgttttgttcaggccgctgcatgaaatgaacggtgaatggttttggtggggacttacatcatataaccaaaaggataatgaaagaatctctctatataaacagctctacaagaaaatctatcattatatgaccgacacaagaggacttgatcatttgctttgggtttactctcccgacgccaaccgagattttaaaactgatttttacccgggcgcgtcttacgtggatattgtcggattagatgcgtattttcaagatgcctactcgatcaatggatatgatcagctaacagcgcttaataaaccatttgcttttacagaagtcggcccgcaaacagcaaacggcagcttcgattacagcctatttatcaatgcaataaaacaaagatatcctaaaaccatttactttctggcatggaatgatgaatggagcccagctgtaaacaagggggcttcagctttatatcatgacagctggacactcaataagggagaaatatggaatggcgattctttaacgccaatcgttgagtgaatccgtaatgtcacaattaagaaggtgctcaagaagtttcttgagcaccttcccactggattaagcattcatatcgcctaacccaggactgtgttcatttggtatttcaggaagcactggtacgggaaaccctgccggaggatctattacttgtaactctccgccatttcggcttggagatttcccttgatagatttcactgattctcgtttcatccaacctaaagttaaactgtgcattatgatagcctaattcgacatactttctgcactcaggatatttattaatgtcataattcggtacagggagcagcttcgcccattcaacgcccaatgtctcgagcgctttcgcgaatgcattctggtgagcattgtcgcgtacaatcagaaaagcaagtgtttcgcggaacgtctgattagagctcatttcataaattcttgttttttgcagcacacctgtcgactcaagaagcaggttatccagcaggtcagtaattaagtttccgtggttatacacccacgacccgttccacggattgccccctgcatcaacaggaagggaactttgcgctccaataatataatgatgaggattagcatgtttaaccgcttcatcaagtggcgcttgatctgcaccttgactgccgacaccttcaccgcctgattcatctaataaagcattgattgtgttttgaaccagttcaacgtgggcaatctcctctaaaaaaatgccgcgaagcagatcgcggtactgtttctgctttcctctgaaattagagctttggaaaaaaaactgcatcattgtacgcatttctccgtaatgaccgcctaatatctcctgcaggaccttagcagctgccgggtctggcttgtccggtttaatgatattaatcagttcctctttgtagtaatacataacacgcctcatttcttcttaagagattttcttatattatttgtaagatgagataaaatatatacatgataagcatgggaagacgtgaaagaagaaaataaaaaaatacatgaaaagtgttgaccaaatgaaacaagcatggtatattattaaacgtcgctgatgaacagcgtgaaacaaaacgaaaaacaaaaaagtttttctaaggtgtttacaagattttaaaaatgtgtataataagaaaagtcgaattgaaaaagattcgaaaaaacattttaaaaaaacttcttgacttcaccatcaaatgatagtatgatagttaagtcgcttgataagcgcccgtagctcaattggatagagcgtttgactacggatcaaaaggttaggggttcgactcctctcgggcgcgccatttaagataccacgcgggtgtagtttagtggtaaaacctcagccttccaagctgatgtcgtgagttcgattctcatcacccgctccattattgaatgatctttgaaaactaaacaagacaaaacgtacctgttaattcagtttttaaaaaatcgcacagcgatgtgcgtagtcagtcaaactactttatcggagagtttgatcctggctcaggacgaacgctggcggcgtgcctaatacatgcaagtcgagcggacagatgggagcttgctccctgatgttagcggcggacgggtgagtaacacgtgggtaacctgcctgtaagactgggataactccgggaaaccggggctaataccggatggttgtttgaaccgcatggttcaaacataaaaggtggcttcggctaccacttacagatggacccgcggcgcattagctagttggtgaggtaacggctcaccaaggcgacgatgcgtagccgacctgagagggtgatcggccacactgggactgagacacggcccagactcctacgggaggcagcagtagggaatcttccgcaatggacgaaagtctgacggagcaacgccgcgtgagtgatgaaggttttcggatcgtaaagctctgttgttagggaagaacaagtaccgttcgaatagggcggtaccttgacggtacctaaccagaaagccacggctaactacgtgccagcagccgcggtaatacgtaggtggcaagcgttgtccggaattattgggcgtaaagggctcgcaggcggtttcttaagtctgatgtgaaagcccccggctcaaccggggagggtcattggaaactggggaacttgagtgcagaagaggagagtggaattccacgtgtagcggtgaaatgcgtagagatgtggaggaacaccagtggcgaaggcgactctctggtctgtaactgacgctgaggagcgaaagcgtggggagcgaacaggattagataccctggtagtccacgccgtaaacgatgagtgctaagtgttagggggtttccgccccttagtgctgcagctaacgcattaagcactccgcctggggagtacggtcgcaagactgaaactcaaaggaattgacgggggcccgcacaagcggtggagcatgtggtttaattcgaagcaacgcgaagaaccttaccaggtcttgacatcctctgacaatcctagagataggacgtccccttcgggggcagagtgacaggtggtgcatggttgtcgtcagctcgtgtcgtgagatgttgggttaagtcccgcaacgagcgcaacccttgatcttagttgccagcattcagttgggcactctaaggtgactgccggtgacaaaccggaggaaggtggggatgacgtcaaatcatcatgccccttatgacctgggctacacacgtgctacaatggacagaacaaagggcagcgaaaccgcgaggttaagccaatcccacaaatctgttctcagttcggatcgcagtctgcaactcgactgcgtgaagctggaatcgctagtaatcgcggatcagcatgccgcggtgaatacgttcccgggccttgtacacaccgcccgtcacaccacgagagtttgtaacacccgaagtcggtgaggtaaccttttaggagccagccgccgaaggtgggacagatgattggggtgaagtcgtaacaaggtagccgtatcggaaggtgcggctggatcacctcctttctaaggatattatacggaatataagaccttgggtcttataaacagaacgttccctgtcttgtttagttttgaaggatcattccttcgaaacgtgttctttgaaaactagataacagtagacatcacattcaattagtaatacaagatatcacaagtgattctttttaacggttaagttagaaagggcgcacggtggatgccttggcactaggagccgatgaaggacgggacgaacaccgatatgcttcggggagctgtaagcaagctttgatccggagatttccgaatggggaaacccaccactcgtaatggagtggtatccatatctgaattcataggatatgagaaggcagacccggggaactgaaacatctaagtacccggaggaagagaaagcaaatgcgattccctgagtagcggcgagcgaaacgggattagcccaaaccaagaggcttgcctcttggggttgtaggacactctatacggagttacaaaagaacgaggtagatgaagaggtctggaaaggcccgccataggaggtaacagccctgtagtcaaaacttcgttctctcctgagtggatcctgagtacggcggaacacgtgaaattccgtcggaatccgggaggaccatctcccaaggctaaatactccctagtgaccgatagtgaaccagtaccgtgagggaaaggtgaaaagcaccccggaaggggagtgaaagagatcctgaaaccgtgtgcctacaagtagtcagagcccgttaacgggtgatggcgtgccttttgtagaatgaaccggcgagttacgatcccgtgcaaggttaagcagaagatgcggagccgcagcgaaagcgagtctgaatagggcgcatgagtacgtggtcgtagacccgaaaccaggtgatctacccatgtccagggtgaagttcaggtaacactgaatggaggcccgaacccacgcacgttgaaaagtgcggggatgaggtgtgggtaggggtgaaatgccaatcgaacctggagatagctggttctctccgaaatagctttagggctagcctcaaggtaagagtcttggaggtagagcactgattggactaggggcccctaccgggttaccgaattcagtcaaactccgaatgccaatgacttatccttgggagtcagactgcgagtgataagatccgtagtcgaaagggaaacagcccagaccgccagctaaggtcccaaagtatacgttaagtggaaaaggatgtggagttgcttagacaaccaggatgttggcttagaagcagccaccatttaaagagtgcgtaatagctcactggtcgagtgactctgcgccgaaaatgtaccggggctaaacgtatcaccgaagctgcggactgttcttcgaacagtggtaggagagcgttctaagggctgtgaagccagaccggaaggactggtggagcgcttagaagtgagaatgccggtatgagtagcgaaagaggggtgagaatcccctccaccgaatgcctaaggtttcctgaggaaggctcgtccgctcagggttagtcgggacctaagccgaggccgaaaggcgtaggcgatggacaacaggttgatattcctgtaccacctcctcaccatttgagcaatggggggacgcaggaggatagggtaagcgcggtattggatatccgcgtccaagcagttaggctgggaaataggcaaatccgtttcccataaggctgagctgtgatggcgagcgaaatatagtagcgaagttcctgattccacactgccaagaaaagcctctagcgaggtgagaggtgcccgtaccgcaaaccgacacaggtaggcgaggagagaatcctaaggtgatcgagagaactctcgttaaggaactcggcaaaatgaccccgtaacttcgggagaaggggtgctctgttagggtgcaagcccgagagagccgcagtgaataggcccaggcgactgtttagcaaaaacacaggtctctgcgaagccgtaaggcgaagtataggggctgacgcctgcccggtgctggaaggttaagaggagcgcttagcgtaagcgaaggtgcgaattgaagccccagtaaacggcggccgtaactataacggtcctaaggtagcgaaattccttgtcgggtaagttccgacccgcacgaaaggcgcaacgatctgggcactgtctcaacgagagactcggtgaaattatagtacctgtgaagatgcaggttacccgcgacaggacggaaagaccccgtggagctttactgcagcctgatattgaatgttggtacagcttgtacaggataggtaggagccttggaaaccggagcgccagcttcggtggaggcatcggtgggatactaccctggctgtattgaccttctaacccgccgcccttatcgggcggggagacagtgtcaggtgggcagtttgactggggcggtcgcctcctaaaaggtaacggaggcgcccaaaggttccctcagaatggttggaaatcattcgcagagtgtaaaggcacaagggagcttgactgcgagacctacaagtcgagcagggacgaaagtcgggcttagtgatccggtggttccgcatggaagggccatcgctcaacggataaaagctaccccggggataacaggcttatctcccccaagagtccacatcgacggggaggtttggcacctcgatgtcggctcatcgcatcctggggctgtagtcggtcccaagggttgggctgttcgcccattaaagcggtacgcgagctgggttcagaacgtcgtgagacagttcggtccctatccgtcgcgggcgcaggaaatttgagaggagctgtccttagtacgagaggaccgggatggacgcaccgctggtgtaccagttgttctgccaagggcatcgctgggtagctatgtgcggacgggataagtgctgaaagcatctaagcatgaagcccccctcaagatgagatttcccattccgcaaggaagtaagatccctgaaagatgatcaggttgataggtctgaggtggaagtgtggcgacacatggagctgacagatactaatcgatcgaggacttaaccatatttttgaatgatgttacatctgttatctagttttgagagaacactctcaatttgtttggtggcgatagcgaagaggtcacacccgttcccataccgaacacggaagttaagctcttcagcgccgatggtagtcgggggtttccccctgtgagagtaggacgccgccaagcattacttttatcatcgcggggtggagcagttcggtagctcgtcgggctcataacccgaaggtcgcaggttcaaatcctgcccccgcaaccaaatatatgattaaataaggagtgccctaagggtacaactaaaataatcttatacaaatatggtccggtagttcagttggttagaatgcctgcctgtcacgcaggaggtcgcgggttcgagtcccgtccggaccgccattaatgtaaacgaaacgatcatgttttcgttttttttgtgttttcttttactgtatcttctgcttggtgtcatagccaagctttctttatatcgggaacatcttggatattccagcaaaattcgataaactaggaagagcacatataggcataagcagggttgaaaggagattttggttcatggatgaatttgatttgatacatagcattactccgcggaccattcaccattcttccgttgatgtaggaataggtgatgatgcagcgctctacactgcgaaacacggcgttcaggaaattgtttgtgttgatactatggtagaagacgtgcacttcaaattacactattcctcacctgaagatatcgggtataaggcgttagccgttaatataagtgatattgccgcgatgggaggcattccgaaattttatttggtatcacttgcggtaccttcaaaatggacggcatccgaaatcaaggcgatgtatgaaggaatgaatgaactggcgaaactatatcagatggatctgattggcggcgatacagtttctaccgctgacaaattagtcgttacagtcactgtgatcggtgaaattgaaaagggacaggcctgtttgcgcagcttggcaaaaccggatgatattgtgtttgtaaccggtgaaatcggttcttctgcagcagggctttctttattgctggaagagactaatcctcaaaactcatctgtggaaacggattactttatccataggcataaacggcctgagccaagagtaagcgtcggcagattatgctcgtgttttaaacgggcagctttaaatgatgttagtgacggattggctagtgaactgaacgagattgcagaagccagctgtgtttcaattgaaattgatgaaagcatgcttccaattcattctgatttacctaagcttcatcctaactggaaagaatgggctttgtttggcggtgaggattttgagctgacagggacggtttcaaaagaggagtgggaagtgttgaagcagcagtgcgcagcacgtcaacttcccattacaaagattggccatgtcagggaaaaaacaaaatctaaagtgatcctaaaaacagatcaaacatcaatgatcttagagaaaaagggatataatcattttaaataagacgggtgactcgtgtgaagcaattaaaatggagaactgtaaatccagaagaaacaaaagcaattgccaagcttgcggcagcgtttgctaaaccgggagacgtcctgacattagagggcgatttaggtgcaggaaaaacgacttttacgaaaggttttgcagaagggctgggaattacacgtgttgtaaacagtccgacttttacaattataaaagaatataacgatggcgtacttcctctttatcacatggatgtgtatagaatggaagatgaaagtgaagatttgggacttgatgaatattttcacggacaaggtgtctgtctcgttgaatgggctcatttaattgaagaacagctgccgcaggagcgactgcaaattgtcatcaaaagagctggtgatgatgagcgggaaattacctttactgctgtcgggaatcggtatgaaatgctttgtgaggagttaagtagacatgacaatattagcaattgatacatcaaattatacattgggcattgcgctgcttcgagaagacactgttatagcagagtacattacatatttgaaaaagaaccactctgtaagagcgatgcctgctgttcattcattgctgaatgattgtgatatggcaccgcaggacctttctaaaattgttgttgcaaaaggccctggttcttacacaggagtaagaataggtgtgacgttggccaaaacacttgcctggtctttagacattccaataagtgctgtatcaagtcttgagacgcttgcggcaaatggtcggcattttgacggtctgatcagcccaatctttgatgctagacggggacaggtgtacacaggtctgtatcaatataaaaatgggcttttagagcaagttgttccagatcaaaatgtgatgctggcagattggctggagatgctaaaagaaaaggaccgccctgttttgtttttaggccatgatacttctcttcacaagcagatgatcgaggatgtgcttggaacaaaagggttcattggaactgccgcccagcataacccgcgtccttcagaattggcttttctcgggaaggaaaaggaagcagctgatgttcatgggcttgtcccggattacttgcggctggcagaagctgaagcgaaatggattgaaagtcaaaagtagggtgataggatgaaaacaaaagcagcggtcagaaatatgcggcttgaagatatagatcaagtatacgaaatcgaagcatcctcctttacgtctccttggacgaaggattcgttttatcatgagctgctggaaaatccatatgctcattatctcgtgattgaaaaggacggccatcttgctgggtattgcgggatttggattgtgatggacgatgcccaaattacaaatatagcgataaaaccagagtatcgcggccagtctttaggagaaacgctttttcgctcagctgttgaactgtgcaaagaaaaagacgcaaggcggctttcgcttgaagtgagggtttcgaatcatcctgctcaaggcttatataagaaattcgggatgcagcccggcggaataagaaagaactattatactgataacggggaagatgcgttaattatgtgggtgacgataaatgagtgagcaaaaagacatgtacgtattaggaattgaaacaagctgtgatgagactgctgcagctattgtgaaaaacgggaaagagatcatttcaaacgtagtagcctctcaaattgaaagccataagcgcttcggaggcgttgttccggaaattgcttcaagacatcatgttgaacaaatcactttggttatagaagaggcgtttcgcaaagctggcatgacgtatagtgatattgatgcgattgcagtaacagaaggtccgggactggtgggagcgcttcttatcggagtgaatgccgctaaagcattgagctttgcacataacattccgttagtaggcgttcatcatatagccggtcatatatacgcgaaccgtcttgtagaagacatcgtgttcccggcactggcattggtcgtttcaggaggccatacagaactggtttatatgaaggaacatggatcatttgaagtcattggggaaacccttgatgatgcggcaggagaagcctacgacaaagtggcgcggacgatgggattgccatatccgggtggaccgcaaattgacaagctagctgaaaaagggaatgacaatattccgcttcctcgcgcatggcttgaagaaggctcttacaacttcagctttagcggattgaagtctgcggtgatcaatacgcttcataatgcatcccaaaaagggcaagagattgctccggaagatttgtctgccagtttccaaaatagtgtgatcgatgtcttggtaaccaaaacggcgcgcgcggcaaaggaatatgatgtcaaacaggtacttttagccggaggagtagctgcaaacagaggcctcagagctgcattagaaaaggaatttgcccagcatgaagggattacgcttgtcattcctccattagctttatgcacggataatgctgcgatgattgctgctgctggtacaattgcttttgaaaaaggaattcgcggtgcatatgatatgaatggccagcccggccttgaattgacttcttatcaaagtctcacgagataatagcgtgagactttttatctgtttgttattaacagataattcacaatttatccacatgtctgtgagtaattatagagatatagatggataaagggctgaagtcactgttaataaagtggataaattcagaatattttgtggatattgtgtataaagcgcttactttgttttgcttattagggtatgttctgtggataaaaagcacctctaaaaagaggtgcttgacttttttaatcttcttctgtggatagttcttcccattcggacaaaagagattccagctcctgattaagcttctcattgtctgcatggatagcttgtactttttcatgatcctgatagacttcagggtcacatagcaattcatcattgcggctgatgttctcttcaatggtttgaacagtggtttcaatttcttcaatccgacggagtcgttggcgctctttctttttccattctttttcttcctcgtaggaacgtttggagtcagacttcacagtagctggcgttttttcagtttcttcttgctgatttattttctccaattcaaactgctctgtttttttctcagtataataatcgtaatctcccagatactcctctatatggcttgaagaaagctccaatactcttgtggcgattctgttaataaaatatctgtcatgtgagacaaataacagtgtgcctggataatcaatcagcgcgttttcgagaacttctttgctgtctaaatccagatggttcgtcggttcatcaaggatgagaaagttggctttttgaagcatcagcttagctagagccaatcttgctttttcgcctccgctcagtgaatgaactggtttcagcacatcatctccggagaataagaaatttccgagacacgttctgatttctttttctgggagcccggggtactcgtcccacagctcatcaaggacacgtttagaggaagtcagctcagcctgttcctgatcataatagccgacactgacatttgagccgtatgagatcgttccttgatctggttttagggtgtctatcaatgttttcagtaatgtcgatttaccaattccgttagggccgacaagcgctgcgctttctcctcttgtgagcatgaatgacacttctgttaaaagcggcggctggttttcatagctgattgtgagatcctgaacacgaaggacttcatttccgctctgttttgtaatatcaaaatgaaagtttgcggatttttcatcgccaagcggttttgacatgacttccattcgctcaagctgctttctgcggctttgcgcccttttggtggtagaggctctcgccaggtttcggtctacgaagtcctgcagctttgtaatctcgccctgctgcttttcatacattttaagatctttttcatactgcgcggctttttggtcgagataagcgctgtagttgccgtgatactttttgctttctgctcttgatacctcgtatacctggtttactactttgtccaaaaagtagcggtcatgcgaaacgatgagaatggcgcctgaatagccttgcaaataatgctcaagccaggtaagcgtatcaatatccagatggtttgtcggctcatcgagaatgagcaaatcaggctgtgttaacagaagcttacctaaagccagtcttgttttctggcctccgctgaggctttgaacctgtgtagaatcgtcaaaatggctgaagccgagaccatgcagcacagatctaacatccgcttcatattgatagccgcctttatctttgaattcctgctgaaggcggtcgtaggttttcatgatgctttctaattcaccggggtcagctgccgccattttttcttccatagcccgcatttccttttccattgcttttaagtggtcaaaaacagtcagcagctcttcttttatggtaagcttagaatccaagccagtatgctgagcgagatatcccattgtaatatctttcggtttaataatttcgcccttttcatacgaaagctggcctgcgataattttaaggagcgtagattttccggcgccatttcttccaacaatggcgatgcgatcacgatttctgacttccagctttatattgtttaaaatagtatcagcaccaaacgatttggacagctgattaacttgtaagatcatcatattatttcacctctgctataataagttaagtgtagcttatgaaccagaagtcagcaaacaatacattggccatataagacatagagaagaaaatagtgtatgatctgtttaaggagcgttttaatatgaatggattttctcattttaatgaacagggcagagcccagatggtggatatcagcgaaaaatcttcgactgtccgtactgcggcggctgtttcaagcgtacacatgaagaatgaagtgtacgagaaaatacagagtcacgatatcggcaaaggagatgtactggctgtcgcacaggtggcaggcattatggccgcaaagcaaacgtcgaatatcattccgatgtgccatccgctttcattgagcgggatagatatatcgtttgactggaaaataaaagaagcagaagttatacttcatataaaagcacaggtcaaaacaaaagggagtacaggtgtggaaatggaagcgctcacttctgcatcggtgtgcgctcttaccgtttacgatatgtgcaaggctcttgataaggggatggtcatcggccctactttcttgctggagaagacaggcgggaaaaacggtgactttaaaagagaactatccgagtataatttggaggaccaaaaatgaataaggatcaatcaaaaattccgcaggcgacggcgaaacggctgccgctttactatcgctttttaaagaatctgcatgcgtcaggaaaacagcgtgtatcatccgctgaactcagtgatgccgtaaaggttgattctgccacgattcggagggatttttcctattttggagctcttggcaaaaaaggatacggatataatgtggattatttgctgtcttttttccgaaaaacgcttgatcaggatgagatgacagacgtcatcttgattggtgtcgggaacttgggaacggcatttcttcactataatttcacaaaaaataataacacaaaaatttctatggcttttgatataaatgagagtaaaataggaactgaggtaggcggcgtgcccgtctataaccttgatgaccttgaacaacacgtaaaagatgaatcagttgccattcttacagtgccagcagttgccgctcaatccattacagacagattggtcgcattaggaatcaagggaatccttaattttacgccggcccgtttgaatgtgccggaacacattcgaattcatcatatagatttagcagttgagcttcagtcactggtttattttttgaagcattattcagttttagaggaaatcgaatagagggaaaggaggagcccaaatatgccgatcggtcctggaagccttgctgttatcgcaatcgttgctctgattatcttcggtcccaaaaagctgcctgaattggggaaagcagcgggagacacacttcgtgaattcaaaaacgctactaaaggattaacgagtgatgaagaggaaaaaaagaaagaagatcagtaagttaggatgacacgaatgaaagtgaatcaaatgtcgctgctggagcatattgctgagcttcgaaaacggttgctgattgtagcgctggcgtttgtcgttttctttatagctggattttttttagcgaagccgattattgtgtatctgcaagaaacagatgaagcgaagcagcttacgcttaacgcgtttaacctgacagacccgctttatgtgtttatgcagtttgcgtttatcatcggcatagtcctgacctcgccggttattctttatcagctttgggcttttgtgagcccgggtctctatgagaaagagcgcaaagtaacgctcagctacattccgatctctattttgctgtttttagcgggcttatctttttcatattatattttatttccttttgttgttgattttatgaagcggatctctcaggacttgaatgtcaatcaggtgatcggaattaatgaatattttcattttcttctgcagctgacgattccgtttggactgctgttccaaatgccggtcatcctcatgtttttgaccaggctcggaattgtgacaccgatgttcttggcgaaaatcagaaagtatgcgtattttacgctcctggtgatcgcagccctgattacaccgcctgagcttctgtcccatatgatggtcacagtcccgcttttgattttatatgaaatcagtattctgatatcgaaggccgcctatcggaaagcgcagaaaagcagtgcagccgatcaggacgtgtcttcggggcaataataaaaaatccatttctcatgagagaaatggattttctttatttttggttctttttgattttaaatgaaaaggcgaacatcttaaaagaaatgctgatgttgtaagcggcgaacaccatcagcaggatggagtaaaatgaccacatgctgcctggcgagcttgcggcaagataagtaaagatgcaccctacggcaaagtagatcattccccaaactaccgggtttctcataaaaataatcctccaataatcaattgcatttgtgtgctctgctgttcaaggtaattccgaacaggctcaagctgcatgatgacgacgaatgtattcatcattaaatgggcgaaaatcggcacccatatccgttttgttctcgcatataaaaaggcaaaggtaaagcccattgctgtatatagaagaagatgcttcaaatcagcgtgaacaataccgaagataaccgagctgatcagtcctgcaaaaaagaaattcgttttttcgtacagcgcgccgaaaatgatttttctgaagatgatttcttctaatataggcccgacgatggaagaaacgataatcatgagcgggactgcctgaatgacatccagaatcgcttgtgtattttctgattctcttccgatgccaaaaacataatattcaatagagcctgctattccttgagagaaaagggcaatgaaaaaaccggctatcgcccaaaggatagaaagtccgattgagtccttctgtccgtttcgcagcgtttctttcggaacggttctcagaatgagcagaacaacaacgagacaggcgataaagctgataacggaccataatccttgtgcatgcagcatattttcatctgtaggctgtcctccggcataaccgaatttaaataacaagggaatcgcgattaatgcggaaaactgcatgatgatatatgtcaaaataataaaccaatactgttttctcaaatggtatgtactcctttgttaagtgggtttcgttcatctacagctattgtaacataatcggtacgggggtgaaaaagctaacggaaaagcgagcggaaaagaatgatgtaagcgtgaaaaaatttttatcttatcacttgaaattggaagggagattctttattataagaattgtgttagcactctttagtgctgagtgctaaaattacatattcatactattgaggaggttattacattgttaaagccattaggtgatcgcgttgtcattgaactcgtagaatctgaagaaaaaactgccagcggaattgtgttgccggattctgcaaaagaaaaaccgcaagaaggcaaaatcgtggcagctggttcaggtcgcgtgttagaaagcggagagcgcgttgctttagaagtaaaagagggcgaccgcattatcttctcaaaatacgcaggtactgaagtgaaatacgaaggtactgaatacttaatcttacgtgaaagcgacattttagctgttattggctaattcttaaataaacaatatttaaaacatttgaggaggtcttgtaaacatggcaaaagaaattaagtttagtgaagaagctcgccgcgcaatgcttcgcggtgtcgatgcacttgctgatgctgttaaagtaactttaggaccaaaaggacgcaacgtggttctagagaaaaaattcggttctccgttaatcacaaatgacggtgtaacaatcgctaaagaaatcgagctagaagacgcgtttgaaaacatgggtgctaagcttgttgctgaagtagccagcaaaacaaacgacgttgccggtgacggtacaacaactgcaacagttcttgcgcaagcaatgatccgtgaaggccttaaaaacgtaacagcaggcgctaaccctgtaggcgtgcgtaaagggatggaacaagctgtagcggttgcgatcgaaaacttaaaagaaatttctaagccaatcgaaggcaaagagtctatcgctcaggttgctgcgatctctgctgctgatgaggaagtcggaagccttatcgctgaagcaatggagcgcgtaggaaacgacggcgttatcacaatcgaagagtctaaaggcttcacaactgagcttgaagttgttgaaggtatgcaattcgaccgcggatatgcgtctccttacatggtaactgactctgataagatggaagcggttcttgacaatccttacatcttaatcacagacaaaaaaatcacaaacattcaagaaatccttcctgtgcttgagcaggttgttcagcaaggcaaaccattgcttctgatcgctgaggatgttgaaggcgaagcacttgcaacacttgttgtgaacaaacttcgcggcacattcaacgcagttgctgttaaagctcctggcttcggtgaccgccgtaaagcaatgcttgaagacatcgctgtccttactggcggagaagtcatcacagaagatcttggccttgacctgaaatctactcaaatcgctcaattgggacgcgcttctaaagttgtcgttactaaagaaaacacaacaatcgttgaaggcgctggcgaaacagacaaaatttctgcccgcgtgactcaaatccgcgctcaagtggaagaaacaacttctgaattcgacagagaaaaattacaagagcgtcttgctaaacttgctggcggcgtagctgtcatcaaagtcggcgctgcgactgaaactgagctgaaagagcgtaaacttcgcatcgaagacgccctgaactcaactcgcgcagctgttgaagaaggcatcgtatccggtggtggtacagcgcttgtaaacgtatataataaagtcgctgcagttgaagctgaaggcgatgctcaaacaggtatcaacatcgtgcttcgcgcgcttgaagagccaatccgtcaaatcgcacacaatgctggtcttgaaggatctgtcatcgttgaacgcctcaaaaacgaagaaatcggcgtaggcttcaacgctgcaactggcgaatgggtaaacatgatcgaaaaaggtatcgttgacccaacgaaagttacacgctcagctcttcaaaacgctgcgtctgtagctgcaatgttcttaacaactgaagccgttgtcgctgacaagccagaagaaaacgctggcggcggaatgcctgatatgggcggcatgggcggtatgggtggtatgatgtaataccgacaaaaaacccttgatttacaaggggttgtcggcaacggacgtcatttttgatgccctttataacttttcgaggcttctcatgagttcactgaacttgtgagaagcttctttttttctgtctttcgtagtttgattttttcagcactgttctatatcgattttcaatagttttgataatcccgatatgaactattcaattgaccaaaatacaaaattctaccggctcagattcctgtttacgtcttctttgataaacggcttactgtaacttcagtaaactgcatttctgttatgattataaaaagggtttaaaaatttttcgtccaaacctctgttacttctctccctattgcagacaggagatggtatcctctcatacagacaaaaaagccccagttttctaaataaatagtgtcaccaacactcttagaagtttccctaaggagtacattgccaaagagaaatcctattaaaatgtctatttgtgctgctttttagctactaagacgatgtatgttaaagatatagaacggcagaataatctgattctcaaaaattcactgtcggtgtagttaggttcttccaccaacatcttgataatattcatcccgactctatggagaccgacattccaattattaaatctaatattagttttttatgattaccaaggaggacttaatagtgcatttttcagaaatgatagatcgcttggctttatatgatttacacagaaaaagaagcaaagataaacatttttctgctgctattgcagccgatatcgatgatagagaggaattttacagtgcgaatatagctgatgtttcaattgatttgaatgaatctaaaaaaaagtatagggttggaacatttcgttatgaatccttaattcaaactgggaatcctgttaatgatactttaaaaggggaggtttttttacataaaaatgatatagatcaacccaatgttatctttgtacacggctggcgcatggaatcgtacaataggatcaaaagaatatttcataagcgtataatgaatgatttaggctggaacatgtattattattctcttccataccattttgaaagagaaccggaaaattcactgtatagtggcgagttgatgattagtgcgaatattgatcgtacaattgagtcgacaagacaggccattgtagatttacgggcattaattcactggataaaagcaaataaaaaaggccctgttatcatagtgggggtaagtttagggggatggatcactaatctaattgctaccctagaatctcaaattgatgtagtggtatcaatcttttatgccaatcgcctttcttattcaatatggaacacgatcccaggtaaattcataagagaagaattagaacaaaatggtgtgacctatgaagatttaacaaaatattggaatatcacagatcctagtcaagccttgccgaaagttaataaagataacattctgctgatttctgctaaacatgatcagtatattgacttaaaagatgcagattatttatgggaaagttgggagaaaccgaaaagatatgtctataattgcggtcattccggcattgttctttgtcgcaaaaagctggcaaatgatacgatttcctttataagagaaaggataaatacgggaaaacctggttcagtacatttgtagaccttaataagaaacaaaaggccaactgcaacttcagttggccttttctatttataataaagaaactgggtgagattgctgtcagaactactatgcgtactagtcgttttctttaatcaccattgccagttcttccacctcaccccgaatcccaatcgcaggctcccacgaatcaatcaaacgaatcgctctctgattagcttccatcgctttcgttttctctcctttacggttcaacagctgcgccatcccgtaaaaataatagatcaactcaacctgattggcgttatgtttgtcatagagcatttgctcaaaggcttcttccgctttctcaaattgaccacatttcacgtaagcgacacccagattgaaataggcttctatcgttttttcgccgccgtacgtggagctgatttcatttgccgcttcgtataattgaatggcttcttcatgatgacctctcgcaaagcttaagtcaccgcgaaccaaaagaactctgtgttgaatggtaggagaaattggttgatcttcgatttcgtttaaaatggtctctgctttttcctgttgcccgtcttttaaaaacagccttgctttgagtgcatgtccccaaacctttagatcataggcatcgtgagcatctgattgttcaagaatcttcagcccggcttctatttgctgtaaggccctgtctaaatcattgacttccatcagagcccagcctgctgtgtcgattcggaagtacgcttctcgtgtgtgttggcctaagtgatgggcggcgtcggccgctttgcgtccgtattcgattcgcaggggcaggttgattctgcttagaaaatggctaatgcgggtgatgagttcgattaggatttctttttgttcagtttcacttgcccattggatgacctttaagatgtttggccattcttttttcatttgatctaagttccgtcccagcaggtagctccaatagatagagttgggctgttcccgctttaaatgggtttcggcataatcaacataatagtgcgcccagcgattgcgggcttctttttcatattcgtgctgttcggacaagtgctgttctccgtaagcgacaacggtttggtgcgctaagtattgtgtccttccttcgcttcgttccggctgaatcagagcgtatgaccgcatttgttccatagcgtaatgaaaacggcgggcgtctaatccggctgctgccgccaggcttttttcatcaggcggcttgctgaaaaagcaaagcgtctgccagagctttcgtgtatcttcattgcatctgtcccaggtgcggccaaagaggaattcaaacaattccagcagtgagtagcctgcttttccaagctcatgaatcaactgctgcgcggggatgtcatcgtctgacatataggcgatgctgagtgccatggctttcgggtttccagcagtcgctgaaatgaattcgtttttcagatcagatgatagatgtaacagctgctccagcttttcccgcttatgtgggaggttgcatgtttgtaagcagcggtgcacttcttgctggaaaaatttcaaggcatctgtttggttaaggccgctcagctgaatagctgtcatttctccgaagctttcccgataagtttgctttacgttttcccgcgctgtgaggagaactttcacgccttgcggaaggctggtgataaattcatgaatgtcacgttctgcagtatcaatgctgtcaacgatcagcaggatcggtttttctctagtgtaattagctaacgcattgcggacgacgaatcgtttttcattgattgatttatcgatttgttctgtacgtccgagctgataggcgatcgtatttaaaaaatcgctaaagctcaatcctttccaatcagcgctgacccaaatgatactgttgaacgccggccaatctgaagtatcgtcgacacaggaataggctgcttcaagagcgattgtggttttacccataccagcccagccggtgattaaacagactggtgacggagaaagcatccattgccgtatcgcttccatatcaaagctgcgtccgataaagcgtccggaccagcgtgagggtaaattatgagtgataggctgttctgtaagcgcattcgtttcatggccgggtctgtcatgaaacagccgttttactacattttcaatttcgtcttcactcggagccccgaataatccgtcttttcgcagtattttcgcttttttcaaacaggatgctgcccatacaggcaatgcgggtttgatgactgggatagtggtggcttccagcaagtcggtcaaccactcgatatccaagtcggtcttttcgagaatgatccagatcattccgaacagttttccgtcgtcgattcttccgggaatgtagtttgctcccatctgtccgatccagcttttgatcgtgtttggggagactcccagctggagtgcgattttatctatgtaagactgtcctgttttttcattctttttccttctgattttataatcaggatgaagttttagcgttttgacgccaggtgccagcagttgtgcaaattgttttcggttttcaagttcagccataagcctgcacctcctattagtactattttatcaatccagcgttttttgtatatgaaaaaataaaagtacagtgccgctgtccttttatacagcaggaaaggctgttgaacgtgttgaaaagcagataaaatgggggcagtaacagagaaaacaaaaatgtatgcacttacattttattttctaaagaaaggaacttgccaaatgactcacacagtacctcaaaacatgaaagcggctgttatgcacaacacaagagagatcaaaattgaaacattgcctgtgcctgatatcaatcatgatgaagtgttgattaaggtgatggctgtcggaatttgcggatctgatctgcattactatacaaatggccgaataggcaactatgttgtggaaaaaccatttatccttgggcatgaatgtgcgggtgaaattgccgctgtcggatcatctgtcgatcaattcaaggtgggagaccgcgtcgctgtagagccgggtgttacgtgcggacgctgtgaagcgtgcaaagaagggcgctataatctttgcccggatgtacagtttttggctacaccgccggtagacggcgcgtttgtccaatatattaaaatgcgtcaggactttgttttctctatcccagactcactttcttatgaagatgctgctttgatcgagccgttttctgtcggcatccatgcggcggccagaacgaagctacagcccggatcaacgattgcgattatggggatgggccctgttgggttaatggctgttgccgcagctaaagcatttggggcaggcacaatcattgtcaccgacttagagccgctgcggttagaagctgcgaaaaaaatgggagcgactcatattattaatatacgtgaacaggatgcacttgaagagattaaaacgatcacgaatgatagaggcgttgatgttgcttgggaaacagcagggaatccagcggcattgcaatccgcactggcttctgtgcgccggggcggaaaattggcgattgtcggtttgccttcacagaacgagattccgctcaacgtgccgtttattgcggataatgagattgatatttacgggatcttccgttatgccaatacgtatccaaagggaatcgaatttctcgcttccggcattgtggacacgaagcatctagtaacggaccaatattctctggagcagacacaagaggcgatggaacgggcgcttcaatttaagaatgaatgtttaaaagtgatggtgtatccaaatcgctgagtgaacagggaggatcttcgtattctccctcttgtttactggaaatgaaaacggattcttggggtgggaaatgatgattgaaacagaaaaagtaacggcaatgaaagtgaagcatcagtcaaaatccagtaccggactgtcctggtttgaacgaatcggttatggattcggtgatatgtcgtataatattatctttcagtttgtaaacgcatacttattattttattatacagacgtcggcggcattcagcctgcggtgatcgcaactttgtttcttgttgtgcgtgtgctggatgctatttttgacccgatcatgggattgattttagataaaacgaatacaaggtggggaaaagcaaggccatatttgctgtgggtggcatttccttttgcgctattcacattcttatgtttcacgacgtctcatttcggtgagaccggaaatatggtatatgcgtatgtcacttatattctgcttgggatgtcctttagtatgcaaacgatcccggtgaacagcttaacggggcggatgacgaattcggtggaggaacgaacggttctgaccacaacccggatgattttggtgtatatcggcattcttttatccatttcctgtgcgacaccgcttgcaactgctatcggaggagaggatcaggcgtttggatttcaaatgacggcgctcatctatgcggctgtcagcatcgttttgaatctatttagtttcttttctgtacgggagcgaattcagcctaaaaagagaaaaaaacaagggatcaaaaagacattatccgttttattccgaaacaaacccttgcttatgttaatttcatcatttttggcttttgcgatcgggtttaatattaaactcagcacgatggtgtattattttacgtataacgtcaaccataaagagttcgtatttatgggcaccgttttatttttcggagcagcgctgatcagcaatttgtttattcctttcttttctgagaagtggggcagaaaacaagtcatgatcatcacggcagctctatcgcttatttcttatgccggcctgcattttacgccgtattcttccattacactcattttcatttggcttttcgtttcgggatttttcacaacgcctttaaatacgcttgcttggggaatggtggctgattgcgtcgattatgcggaatggaaaaccggagttcgcgcggatggtgttgtgatttcgagcatgagctttattaataagctgggtgttgcgttagccgggtcattttcggccatttacttaggaatcgccgggtatgtggcgaatacagaccagacagttgcgtcattgaatgcgattaaaaatatgaatgctttgattccgggatttttcattttgctttctattattcttatcgccttctatcctttaacggaaaaaagatataaacacatcatctctgagctggagcaaaggtctgcgagataaatagatgtaaaatttttaatattcaatgttgtatttatggcagaaagtaatatactgagactgtaatctagactttataaatgagtgtgataatatgcgtagtcattctgtagtttgtattggggaattgttgatcgatttcttttgtaccgatgttgacgttgatttaatggaagggcgccaattcctgaaaagtgccggcggggcaccggcgaatgtgtcggcagcaattgccaagctgggaggagacgccgctttcagcggaaaagtaggaaaggatccgtttgggtattttctgaagcaaacattggacgctgtacacgtcgatacctctatgctggtgatggatgagaaagcgcctacaacgcttgcttttgtttcattaaaacaaaatggagagcgtgactttgtttttaacagaggcgcggacgctttgtttacgctggaggatattgaccatgaaaaactaaacgaagcgaaaatccttcatttcggctctgcaacggcactgctatcagatccgttttgctcagcctatttacggctgatgtcgagtgcggaagacaatggacagtttatttcgtttgaccctaactaccgtgaagatttatggaggggaagagtctcagagtttgtaagtgttgcgaaaaaagcgatcgctgtaagtgattttgtgaaagtcagtgacgaggagcttgagattataagcggtgtgaaggatcatgaaaagggagttgcgatccttcatgagatcggagccaacattgtcgctgtgacacttgggaaaagcggaacgcttctttccaatggaaaagaccgtgaaatcattccaagcattccggtgacatcaattgactcaacaggggcgggagatgcttttgtcggtgcggctttatatcaattggcaaacacggatcagattcaatctgtagatgctaattttgtgaaactgcgtgagattgtgtcgtttgccaataaggtcggagctcttgtgtgcactaaaattggagcgattgatgcactgccgagcttggatgagattgaagtttctttgtaaacattgaagatgtttcttgaaagtctttggacttttggaggcatctttttttattgcttacatttttgttcgggtaaaaagttgtgtattttttgtttgaaatgtcattttttattaaaaaagtgaaacttttaacgataataaatagtatatgtaacaagggttaccgaatttgctttaggaggaacgatataatgagtataattggaagatttaaagatattatgtctgcgaatatcaatgctttattggacaaggctgaaaatccggagaaaatggtagatcaatatttaagaaatatgaatagcgatttggctaaggttaaggcagaaacagcagctgttatggccgaggagcagagagcaaaaagagaatatcacgagtgccaggcggatatggaaaagatggaaagctatgcaatgaaggcgctgcaagccgggaatgagagcgatgcgagaaaatttcttgaaagaaaaacatctttggagtcaaagctttctgagctgcaggcggcgaatcaaattgctgcaaccaatgccgcacagatgagaaagatgcatgacaaattggtatctgacattggagagctggaagcacgtaaaaatatgatcaaggcgaagtgggcagtagcgaaaacgcaagaaagaatgaacaaactgggcgcttctgtttcaagtacaagccaatcaatgtctgcattcggccgaatggaggacaaagtaaataaggcacttgatcaggccaatgcaatggctgaactgaacagcgctccgcaggatgatatggctgatctgactgcaaagtatgacactggcggttcaagccaggttgatgatgaacttgcggcgttaaaagcgaaaatgatgctcgataagtaatacataggaggccgcagctctcggctgcggcgtcattttatcataagatgtgagagggaacggtaatgataatatcttataagtgtccgaactgcggcagtgatatggcatttgacagtgaaaccggctcgttatcctgcagcagctgcggaagacaggacaatattgaaagccttccgaaagaaaacattgcggcacggttttctgatgatgaagcaaaagaatatcaatgtgaaaactgcggtgccgttttgatcacggaagctgaaacgacagcaacgacgtgcagcttctgcgggggtgctgcaatacttgccgatcgattatcaggtcatttggcaccggcgaaagtcatcccatttacaatcagcaagcaagaagccgagcaggcatttcgaaagtggtgcaaaaaaggccttctgacaccaagaggtttcatgtctgccgatcgcattaaaagcatcaccggcatgtatattccgttttggatgtttgatttaaatagtgaagtacaggtgagagcaaactgtaccagggtccaccggtatgaagaaggggattatatttgcacggaaacagagcactttgaagcatttcgtgatatcaatctcgattatttgaaaatccctgtcgatgcctctgaaaaaatgaaagacgaattaatggacaaattggagccttattcatacgaagagctgaaggactttcaaacggcatatttggccggttatattgcggaaaagtacaattataccgatgaggagctttttccgagagcaaaagagaaaatcagcagttatatagattcatacatccattctactttttccggatatacgtcagtcaatgtgagggacaaacatattcacacgaaaaacgtgaacagcttttacgttttgcttcccgtttggatggtcagttacgattatgaaagagcagagcatatctttgcgatgaacgggcaaacaggaaaggttgtcggaaagccgccgatcagtcgaggaaaagtggcggcatggtttagcggaatagcaggcgggacatttcttgcgttgaagctcgtctcattgatgatgggaggcggattttgatgcgtggattttttggaaaagcgatctttgttgtgctggctgttttcatcatgatgcctttactggggatcgaagcggcaagagcttctgaatcacagcagcatgtgtacgatcgcgctcatctattgtcaaaagcggagatcggaaaacttgaatctctctcggcagagctgggtgcaaagagggacactgatttcatcattattacgaccaaaagcacaaacggtgaagatattgcagactataccggcgatttttatgatcgttacggaaaaggcagtacagctattttaacgattgatatggcggatagagaagtattcatctcgggctacgaaaaagctgaaaagtatttggacaacagcaggctcaatagcatcagaaatacgatttcatctgatttatccaatgaaaattattttgaagcttttgagacatatattcagctttcctataaagatatgggcataaaaccgggagtaaaccccgacaacatattctttacatggtggtttcagctgattgctgccatcgcagtcgggggaattgcggtttcaatcatgctttatcatgcaggcggcaaagtaacggttaatggaaatacatatatggatcagcgtacgtctgatgtgattgatcaatacgacacttatattagaacgactgtaacaagagaaagaaaaccatcagataaagacagcggcagcgatggcggtgttacgaaaggcggcacgtcatacagtgggagccgaggcagtttctagtagaagaaaatagagaaagggagaggcgtaatgtcgtttttcagaaatcaattagcgaatgtagtagagtgggaagaatttagagatgatatgattttttataaatggaacaatcgtgaaatcaaaaaagggagccgtttaatcattcgtcccggacaggatgctgtctttttgaacaatgggcgggttgaaggagtctttcaagatgatggcgattatgatattgaatcagaaattattccattcctttcaacgttaaagggctttaagtttggctttaacagcggcatgcgagctgaggtgctgtttgtcaatacgaaggaatttaccgtaagatggggaacaaaacaggcgataaatattccggcagcgggaatgccaggcgggatacccattcgcgcaaacggcacatttaattttaaggtgcaggactatatcagcctgattgataaaatcgctggcgtgaaagatcaatattttgtagaggatattaaaacccgtatcatttctattctggatcagcttctcatgaagtggatcacaagagaagggaaagatatgtttaatcttcaagcaaacgcttttgatattgccaagggaattcaagaggacttggatatgcaattaataagcgacgggatgacggtcactggttttcaaatcatgagctttaattatcctcaagaggttcaagatatgattacaaagaacgcttcctatggtatggttggggatgtgaacagataccagcaaatatcaatgacggatggaatggcatccggaaagatgagcggaggcggagcggcttcggatatggctggaatgatgatgggaatgaatatggccaatcagatgatgaaccaaatgaatcaaaatcagcaggcacagtcatcaggcccacagtcaactggcagcggaagcaaaccgaatttctgtccaaactgcggaacaaaaacgggcgaagccaatttttgtccgaattgcggccagaagcttgtataagaatcatacagtgaaaagtccggagtgatcagacactccggacttttttatttaggagaataagcgttacctattgcttgctcctgaacaggccattttcgagcacccgcttggataattcccagcagcaattgacgacgttcctttattgaattgacggcaatttgaaatgtttgctttgataaagccggtatgcctgattgttgaagctttgagatatctggttccggcggcgcttgttctgcaggatggatataggcagtatgaacggtatccaggtagtttttgatacttgagcgcgcttctttgatgtgaagctgattcggctgatattgttcaggaattccgtatttgaaaatggttagagcctcatccaatacagcaacagctataatggatgattcctgatgctgcgtgctgtggtaaaaatgaaggatggggaaggcgttatgctgagcggtcagctttcccagttctgatgaggcagcgacaagaagaaaatcaatgtcgtgaaaatctttgccattccatgcattatggacgatttctgttccgtcatgtcctagacttaatacactttgggcaaaggagcgtttttgattaaccgcactcaagacggaaatcaaatacgtgacagaaaacgtgatggtaagcagtccttgagctgtttcaataatcgtgacaagcttccataggcctccgttcggagcgaggtcgccatttcctaatgtaaacatgacatagccggaaaaataaattcggtctgaccaggaagccggttcttttgattgagtttccataagtgagtgagggtcactcgagtaaatcaaaacccacccgctccaaaatagactgatccatatcactaacgtcaggcataacagcagaggaccagccatacttagaacctttgcgtggtcaccgctgattttgcggcaacccttccacagccaggcagacaggcatcttgtgatcgggccggcaccgctctctaaccataacgtggtccataaaaaatcaatcatccctgctgtcaataataaaaggcctgcaatgatataaccctcattcattttggttgcctcccttaagtcagccttcttttattttcttctctatttccttttatcctaagtctgaaacaattgaacgaatgtttgattttagatgaagttacccaaaacttactcatttatcgatatgaacagaaaatcacaggatttttgacttgattcacacatttttatgaagaaaaacgttcattttccccttgaattggtgattttccttttatagagtaaaaaattttcagaaatttatattgactgaaagcgtttttataattatgataatatcagatataacaaaaatgtcactattatattactacaattgaactatcaagtgactattaaatgccaaatttacaaggttatgcacaaagaaatgaccattgttcttttagcgagaaatgaaatcgtttccatcaggactgacatgctaagaagaagggaaggttatgaggttattggataaaaacatgaacaactattttctgaagcctgcttacgaaatgtgaggaaggcagcagccctggaataagtttttgacatacgcattttgaaaaagactgggggaaacagtatgaataaacaaggcaatcaaatgtcatttttacgtacaattattttagtctccacttttggcgggcttctttttggctatgataccggtgtgctcaatggagctttgccgtatatgggagagccggatcagcttaatctcaatgccttcacagagggccttgtcaccagttcacttctttttggagccgcgctaggtgctgtgtttggcggcaggatgtctgattttaacggccgccgcaaaaatattttgttcctcgctgttatattttttatttcaacgattgggtgcacgtttgcaccaaatgttacggtcatgattatttcccgttttgtgctcggtattgcggttgggggtgcatccgtaacggtgcctgcctatttagcagagatgtctcctgtggaaagcaggggacgaatggtgacgcagaacgaattgatgattgtatcaggacagcttttggcctttgtttttaatgcgatccttggaacaacaatgggagacaactcccatgtgtggaggtttatgctggtcattgcgtcacttccagccgtgttcctgtttttcggcatgatcagaatgcccgagagtccccgttggcttgtttctaaaggaagaaaagaagatgctttgcgtgtattgaaaaaaatcagggatgaaaaacgggcagcagctgagctgcaagaaattgaattcgctttcaaaaaagaagatcagcttgaaaaagcgacatttaaagatctttcagtcccatgggtgcgccgtattgtgtttattggattagggattgcgattgtacagcaaattacaggtgtaaattcgattatgtattatgggactgaaattctaagaaattccggtttccaaacggaagccgctttaatcggaaatattgcgaatggcgtgatttcggtattggcaacattcgtcggaatctggctgctgggaagagtggggcgccggccgatgctgatgacaggcttgatcggtacgacaacagcgttattgctaatcgggatattctcacttgtacttgaaggatcaccggcacttccatatgtagtcctgtcattaacggtcacatttcttgcttttcagcagggcgccatttcaccagtgacttggctgatgctatctgaaattttcccgcttcgccttcgcggactgggaatgggtgtcacggtattctgtctgtggatggtgaattttgcagtcagtttcacgtttccgatattgctggcagctatcggcctgtccacaacgttctttatcttcgttggattaggaatttgctctgtcctgtttgtgaagaggtttttgccggaaacgaaaggactttctcttgaacagctggaggaaaacttccgtgcttatgatcacggcggggcgaagaaggattctggggctgaagtgattggataattaaaaaaagaatccgcacccgagtgcggattctttttggtttcaaattagttaggtctgacaaggattttgacttggcttttctctttaataagagccccgaagccttcctcgatcaaatcatctagtacgatttttttcgttacgagtttgtcggctgagaaatagccttctttcattaatgacaatacagccgggaagatgtcacggtatccgataattccttttactgtacgttctttgattacgatatcgttcggatggatttcagcacctttttcccaaatgctgacgatgacggtttcaccggcaattgtagtggactggatggcttgtcgtaacaccactgggacaccagtgacttcgaatgctacgtcaacaccgcctcctgtacgttctgcaatctcagcgactacatcgtctgttttagacggatcaacgatgatcgcgccaagctcctcagctttttgctggcgttcaggagaaagctcaacagcgtaaatatcagttgcaccggcagccttcagcgcttcaatgacaagaagtccgatcgggccgcagccgaatacagccgctttgtcgcctgctttgagtttgcttgagcggacagcgtatagagcaactgcagaaggttcaacgagcgcgccttgttcatatgataattcatcaggaagtttgaacaaaagctcttcatctacagagacgtattcagagaaaccgccgcctccgccggctaagccgaggaatcccatttgttcatcaaggttgtaggcgccttggtggccgtgtgtagcaaaaatcggctcgactacgacgcggtctccaactttataattttcaacgccttctccgacttcgacaacttcaccggagaattcatgccccattgtgacaggtgccgtttcatttgttaatgggtgcggtttgtcaaccggaataaagatcgggccgcccagatattcgtgtaaatcacttccgcagatgccgcaccatttgactttgatctttacttttcccggctccgtttttggctcttcgatatgttcaatacggatatccttttggttatgccatcttgctgccttcatggattaccactcctataacttttgatgtgagtaattccgcaccggtcaatatgaactgttcacaaaatcgccatttttaaaaccaaaaaagaaatgaaatttttatataatataatctacgtttttttgaaaaaagaaactttgaagaaaaaagggtctcgcacactcttttttctttatatgagagtatcaatcgtttacatagctatgaatttggtttgaacaatacggtaatggttcgttcatattgaatgcgacaactactctatcaataattataacgctaatactgctattataataggataatcttccatggtttattttagcagagtaacttttttgactttgtaacattactgtaaggatattgaaataaaaaatagctggttgatcgtgtataatcttcctagatgttaacaaacagggggacgaaatgttgaagaaagtcattttagccgcttttatcttagtaggaagtactttgggagcttttagtttttcatcagatgccagtgcgaaacatgtgaacggaaatattacttggtataatggagtcgggaaaaaaggctcttcaggtaagaaacttggacattgggattgtgcgaccaaaatcggatttgatgttcctagaaacgggacaaaaatcagagcttatgcaaaagcgaagcctaaaaaggtgattacggtttataaaaatgatgttggcagaatgcctaatgcagtgctggatgttagccctaaagcgtttaaagcgcttggatatccattaagcaaaggtaaagtagcggggcattacagctattaatgtacatatataatctggaaagcaagaagtcacattcttgctttttctattggtggagataaaagatgaaaaaaagaatcatattattattagcagtgataatagcggcagctgccgcgggggttgcgttttatgttgcaaaggataaaggctatgagaaggctgctgatgtttcagtcaataccgaaagcggtgatgagctgctggtttcaattacagatacggatctgctgacaaagtattatgaaaatgacaaggtgatccatgaggagaagctgaccagctatccggcatttgccttggatcaaaaacagcaggtgctctattatacgggcaataatgaacagaatgaaatgaggctttttaaattggatctgaagtctcataaaaaaacgatgctttataaaggcgcggagagtgcggacagtttgtttttatcaaaggaccgttcaaccatctatttccgcttaggaaaagcggacgaaagcaattttcggatcgccgcttttgatctgaaaacgaaaaagtacaaaaatctttatcctgccgctaatgatcaggataacaccgtcagcagcttcttttataaccaaaaaaacgattcatttgcattgcttcattattctgtagaagaagactacaagaaaacagatgaagcaaacgaaaagggcatcgacccagaaccgacaacgattcattttgcggaaggccgccaaaataaatttaatgagctgaaaagcctgaaccaatttatcagcgatattgctgtttctgttgatgataaacgtattttattcacatcatatacgcaaaaaggaacggagcaaaccgcttctattcaaatgctcaatgcggatacgaaaaaatatgaaagcatcatctcaaatcaaaaatcatttaagctgttaattgacgcacagcctcagttctctaaggatggaaagaacatttattttcttgccgaagccaagggggctaaaaagctgaaggacgaaacagggcgtgaagctaaggtgcggacgatttattcctatagccttgaaaataagaccttcaaaaaagtatgggaaaatccgaacggcatcatcaacagcttttctgtgattaactaataaaaaccactcggcataagctgagtggcttttttaatggacgaggtgcagggctaatgattcgagccatttaaagatatgaatcagaggtaccgacaaaaacagaagttcaacatatgagttcattgcaacattcagctttttgaacgcagctctttttttcaagtctttttgctgctggtttgagatcacgttatcactcctcgtatatccatattataccattgaaacagacaaaaaaagccctaaacgtttacagttttgggcttctttcttcgtatttggcctcttgcaatgagaggcttttattctgaaatatagaattttgtctccgttcggggtttgttgcttgcgggagactgcatttgttatagggaagaactagcttgttttcgtttggctgttgttttggagattcactaatgaacggatgccgtcgaccattttacttccgcacaaagggcacaatggcgtatcactgctggcgaagttttttcgggtccagccattacagtcttcttttgtgcattcccaagtactcacatcttcttttggcagcggttcttgatttcgtttgttatagtaagacataaagtcacttcttccctcatgtattttactgcacatttcttattgtctcatacttttccctaatctcctaattcctttttctttatgactttccaataaccccatctaaaaaggagaggagtgtgctgttaaaagcatctggctcttctaaaaacgggcaatggctgcttttaggaaaggtaacgagtgtcgcgtttggaatattgctgcgcaagtgttccccagctgctgtagagaaaaatttcttgtcttccccgaagcacagcaatgtcggcacattgatgttttggagggtgccccggtaatcagcggccgtttggttaaataaaatcgtgctagaaatggcagccggctgtttgaggatttctgccagcatccattctgtttcggtctcggcaggcggttctgcgaacatattctggatgaagctttcgtagaaaggcagcgggtcagtttgaatggcgtgcatcgctgtttttaagccgtcaaaatcaaatggaccatgttcccagccctcccattgatagtccgaagcggattgatcgatgatcacagcggcttgaatgttatcattcccaaactgattgagataatcccatacgacaaaagcacccattgaccagccggcaagaacgacatgatcaagctccattgcatttagaaattcccttatgtcacgggcatattgggaaatggtgtggccgtgaagcactttgtcagattcgccgtgtcctctaagatcaagacgaatacattgataattggcagaaagcgccgaaaattgtttgtggaaaaattgtccgctcatcagcaccccatgtataaacaggatcggcgtcccgctcccgtgtgtttcatagtaaaggcgtgtctgatcttctaatgtgatgtatggcatgtttctcctcctttagtttccatcatgagtatggctggctgctgttgagctgatgatgacagctgtcgcggctgcctgctgcgcttgaatggctgtttcgatagcggtgtatagtcctgattccatcagcagatttttctccatatgctcactgagatagaggctgacagcaattttaaaattcatttccttttgccatttaaaagctttttcctggtttaattcgtcagtgatgcacaaaaccgttttgatatctggctcttccagaaatgtgaggagagcaaggtctggataatgataatcctttggttttttgacagattcagtgatcgattgatatatctgtttgcaagcggaaacaagcatttcgggctctttttcactttgcaaggccagaatatggctgacctgatgtaagtactgtccttttttaaagccgttggctgccagcagctgatagcatgtttccgccttctgtagcgcctgcaaaccttctccgttttctccaagcagtacggcaagcggaacattctgagttgaagtgaggaaataatgatttttcttcatctgctgataaactgctagccccatgttcatctgttctttttggtttgtcgtttcagattttccggtgagcaagatcagagcggaaaggtatgtgaacatatcccgcttatatcctagcttcaccatttcattgtatacatcgataaaagtatgaaatgtttgttttgcctcatgctgaaaatgaatgtccagaatagatgcaacagtaaagcggtggtgtgaattgagtgttgagaagctgccgatgtttgatttgatatagctgctcaaatcataaaagcgctgaaaatcaaactctcttttattcacaatatatgcagaagaaatgagcattaatatctgatcgtgtgaaactttccattttaattttgattttaatttagcataaatggaaatgtattgctttattttttcatgtagatcgtgtgtgagcataaaaagcagctccttttgttgtttttacgtaatacgataaatagggccaaaggtttcataaagaaaaaacttgcctgctagaggcaagtttgtcggattatttatggggatctgttatatccatcggtctcatcatgtcatagtcttcatgctctagaatatggcaatgccatacgtatcgtccgctgtacggaccgaatgtcgccgcgattctcaggacttcacctgcatgcgcttgaatggtgtctttccagcccttttcacttggcggcggcgggacagccggaccggtataggacaattccccgctttcttgataacgggcgatatcaaacggccgccggtctaatacacggaaggagactagatgcaggtgaatcggatgtgttccgcgtgtcgggttgataatggaccatatttcagtagtgccgacttttggtgcttctgtgacgggatcgtgccagcgtttgttattaagcagaaggacgggtctgccgtattcgtcctgggtgcctgccagttttaacgttctgatgttttgtattctttcatgctgtaccgaagggtatgaggcgaggtacttcggctttctgctttcgtctttttgtgccaatggttttgtgactctgaattgcatgatattagcatctgtttcaggattgacgtcaccgccacagcccgcgctgtttgccaaaatgatcgattctccttcatatgctgtgaagtcaatgatgatatcgtaacgttcagcaggcgcaaggctgaaagaattcagtttaacagatcgcggcaggagacctccatctgaaccaatctgaataaactctccgccattatcgagtgacaggttataggttcttgtattggaggcgttgatgactcggaatcggtatttcctcggctcgacctccaagtatggccataccttcccgttgacgagtatggtttctccgcaaaaagccggaacgattgaaggattaggcagtgacggagaagggttttccggtgcgctcggataaaacaaagaaccgtcctcattgatcgtgcggtctgtgataagaagcggcacatcgtattcgtctgaaggcagttttaagcgtttttcctttgggtcatgaatgatataagcaccgacaagtccggcatagacatttagcctggtgagcgccatggcgtgatcgtgataccacaatatagccccgcgctgctggtttggataatgataaacctctcttttgaaataaggtcctgtttgttcaaagtctttggaaaaccaagcctcgggatacccgtcactgtcatctggcgtgacgccgccgtgtaaatgaacaacagtctttacctcggactcttcatgctggctgtcactgtgatgaatggtgtgatcaatcggaaggaaatgcgtggaaggtaggttattcatccattttacatatacgttttcatttcttttaacctcaatggtcggtcccggaaataagccgttgtagccccacaggcgggtcggagggagatcgcgatggagctgatgggtgcattcctccatggtcacttcgtagtatgttttttcttttgattgctgtactggctttagtgtatctgggattgggagagcatccacaaatttttcaagtgtcattttcatctgtccttatctaaattttccaaattggtactatagttaatgacaataaggacgtgatggttacaaaaaatcttcgtgctgcagactgcccgagaaagaaaataacaaaatcctaaacggcagtccgtttaggatttgatcagcattaaggcaggatatcgggttgctgctgtgtgactgggttggcagccgctttctcgctcaccttgcgttttctgaacacaaggtaagaaatcagaacgattcccgtgatgacgcctgtcagcagcagctcgtctctcatggaatcaataaacgccatggacactaaaattccacaaatggcgatgatggtcaagtaggttaggaaagggaagagccacattttgatcttcaatgcttctgggtttgttttttcgagttttttccgcattttcagctgggaaacagcgatgacaagatagacgagtaaagcgattgcgcctgatgagttgactaagaataaaaagacggtatccggtgaaaaatagttcattacgaccgcgatataagagaaaaatgtgccggccacaatggcttgtacgggaacgccttttttgctcaatttcataaaacggcgcggcgcttcgtttctttctgcaagtgaatacagcattctggatgtggtatacaaacctgaattcaggcaagagagtacggctgtgaggacgataaagttcataatctgtgcggctgcgggcactcctatatgctcaagtacagcgacgaaagggctttctaaaatatttgctgaattccatggcaacagcgccacgacaatggcgattgagcccacgtaaaagacgatgatgcgccatacaacggatctggtggcttttgtcacagattcgatcgggttggatgtttcccctgctgcaatggcaacgatttcagttcccataaaagagaagatgacaacgacaatgccgagcaatacggagctgatgccctccgggaaaaatccgcctttgcctgtaagattcgaaaaaccgactggctcactgcccggtgcaaagccaaaaataaaggcaaaaccaacgattagaaaagcaatgatagtcacaactttaatgagggagaaccaatattcaaactcaccgaaagacttaacggagtagacgtttgtcagggtgagcacaatggtcaagatcaaacttgtcagccacagcggaatatcatggaaccagtattgaataatgccagcaccggcaatggcttcgatcgagatgacgatcacccagaaaaaccagtacagccagccgattgtaaatcctgcccacggtccgatggcgtcgtgagcgtattgagaaaacgatccgctcgtcgggtttacggcagacatctcaccgagcattctcataataaaaatcaccaataatccggctaacgcgtaagaaacaacggcacccggaccggtcgagtgaatcactgaaccgctgcctacaaataggccggctccgattacaccggcaatcgaaatcattgtcatatggcgggtctttaattccttttttaatcctgattgagattggttcataagttacctccttttaaaatgcaatcattactgaatattatgataattgaaactctatcataaatatacagtttgtcgaaaattcatgtgagaaaatataacgttttatttcaaatttgtagtgttttgtttgcgctttcagcgaatgtgtggaaaaaatgtttcgttttttatttgctgtgtgattttgtgtactatttacaattcgatagaatgcgagaagcgctggtgtcattggatctgatgggctttttggcggagcaaataaattggatgagagaaaaagtgttccatcgtcactatttttctgtggcgggtgaatcatgtttctgtagacccactgcggttcagctttgtaagataataataggaaaatgtgagcggggaggaggttttgtatggagagatatgatgaactgaaaaagggagaatccggggcgctggtcagcattgccgcgtatcttgttctttccgcaattaaactgatcatcggttatctttttcactcggaagcacttacggcagacgggttaaataacacaactgacattattgcttctgttgctgtgctgattggcctgcgcatctctcaaaagcctcctgacgaagatcatccatacggccactttcgagcggaaacgattgcatcgcttatcgcatcgtttattatgatggttgtcggcctgcaagtgctgttcagtgccggagaatctattttttctgctaaacaagagacgccggatatgattgcggcttggacggcagcgggcggggcagtcctgatgctgatcgtttatcggtacaataaaaggctggccaaaaaggtgaagagccaggcgctccttgctgcggctgctgataataaatcagacgcattcgtcagtatcggcacatttatcggcattgtggctgctcaattccatcttgcttggattgatacggtcactgcgtttgtgatcggtctgcttatttgcaagaccgcatgggatatttttaaagagtcatctcactctttgacagatggattcgacataaaggacatttccgcttataaacagacaatcgaaaaaatctccggtgtgagccgtttaaaagacataaaagcaagatacttgggcagtacggttcatgttgatgtggtggttgaggtatcggctgatttaaatattacggaaagccacgatatagccaatgaaattgagcggagaatgaaggaggagcatgcgattgattattcgcatgttcatatggagcctttagaacaaaaataatggagcttcctgccacaggaagcttttttgtgtgttttggccagctttattggaaacaatttgctagaatcgtttttttatacagattgctttttgtggtaaagttaggttacattatgatgaattttgtagatgactaggaggaaaagaatggcatatcaagaagacctgcatcctttgctggggaaagcagttgaacatattaatagagtaatggttggaaaacgagacatcgccatactcagcttagcagcccttcttgcaaaagggcatgtgctgcttgaggatgtacccggagtcggaaaaacgatgatggtccgcgcgctggcaaagtcaatcggcgctgatttcaaaagaatccaattcactccggatttgctgccatctgatgtaacaggggtatctatctataatgcgaaaacgatggaatttgaatatcgtcccggcccaattatgggaaatatcgtgctggccgatgaaatcaaccgtacctctccgaagacacagtcggctttgctcgaagcgatggaagagggaagcgtcacggtagatggccatacgatgcagcttgccgctcctttttttgtgatggcaacgcaaaacccggtcgaatatgaagggacctatcctttgccggaagctcagcttgaccgttttttattcaaacttcggatgggttatccgtcctttaatgaagagcttgacgtcttatctcttcaggaaaaaagccatccgattgagacgcttgagccggttattgcaaaagaagacttcatctgtttacagagggaagtgcaaaatgtccgtgctgatgacagcattaaggaatatatcgttgaaattgtgcagaaaacgagacagcatccttctgttcaattaggcgtcagtccgcgcggctcaatcgccctcatgaaagcggcacaggcatacgcgctgctgcatcatcgcgactatgtcataccggatgatattcaatatttagctcctttcacgctgccgcaccggatgatgcttcatcctgaggcaaaatttgaagggattcaggcagaagcgatcgtaagggagatcatgtcagctgtgaaggtgccggttcaaaggtcgtcggtccgctgatgaataagaaatggcaatggctcgtatatggttggaagctgattatattaactttattgacggctgctgttttttcttatgcgatgtttcagggcggctttgtcagctggtttttgttttacgcgtttctcccttttgtcttgtatgccgggctgttggccttgtatccgctccgttcttttcaggcttcaaggcaaatggataaaacacaattgcatgcgggggacaggctgggtgtaacggttacgctgagaagaaagctgccattccccctgatgtatatggtgattgaagattgcctgccagaaggtatcgagtcattaaatcgagacggagccgcggccaaacggctcgtttttccttggtttaaacggagcatgacgatgtcgtatgaattagctcgggtaccgcgcggagagcatcactttcattctgtcagggtgcgaaccggggatgttcttggcttgattgaaaaaacagcattttttgagctggatgataccctgtttgtttatccattctatcagcgtttttcctatcaggtgaatgagaggcatcaggaagacggtgtaagcggttcttctcctattcatcagcaccattcctcagtcgcagcaagtgtgcggaattatcagccgggagaccgatttgctgcgttagattggaagacatctgcacggcggagccagctgatgacgaaggaatttgagccttctcgcagcaaaaatctgtttctgctgatggaccgtttttcctcagacgcattcgaagaggtcgtttcagtgacagcttcgattcttcattctgttttaaaaaacggcgcgggtgctggtctggcttccatcgggaaggaaaaaaacattttccctattcaggaaggggatcagcattttaagcacatgcttcggcatttagccatcgctcattgtgatgcggcagacccgataagccgatatgcacgggaagagctgggaaagccatctgttcgccaagctgatcaagttgttgtcacgggacagttaacggaagatatgctgcacctcgcagaaataggaggcggccgggttacggtgatactggcaaaagagaaagatgctgagctctctcaagctgaaaatgtcatgattgaacgcatgatgaaacgccaaatcagagttcgggtcatgaggggcgggcgagtttcgcgtgttgtttagaaagagaggtgactggttcacatgccgcacgatgatcacaaggggagccgtttgagcttgctgttattttattttctggcttttttattgctgtgggagtggctcaggccgcttgacagttttactgaaacgaaacatacaggcttttttagtgtctttatcggcttgacgtttctgctgacttttttcaggatgaggtggtttgttaccgttcctttttgtgtcttatttacattgatctcgatacacatcctgttttatcaaggatctatattcgacttgagctgggtcagctcttttttgcaggatgtctatctgaatatcacgctgattcaatctgggcaatggaatgacatgattccttcatttcggaccctgctgttttttgtgctgctgtggctgctggtctatctcctgcattattgggtgatttaccagagaagaattttgtttttctttatgatgacagtagcgtatattacgattcttgatacctttacgccatatgatgccacttttgccgtcatccgtatcgtgctgatcggcttctttatgctgggccttttatacttggagcgcattaagctgatggaaagaatcacactgccaaaaacatctgtcctgaaatggtttcttcctttatctgtattggttttggctgcaacgggattcggactcgccgctccaaaatcagatccggcctggcctgatccggtgccttttcttaaaaaaatcactcatcaagaccgcgtgtctgcaggggaaagcaaaatcggatacgggaatcatgatgaatcactcggcggcccgttccagcaggatgctacacctgtttttacatggcagggaaaagagcgtacgtatttccgtgtggaaacgaaggatacgtataccgggaaaggctggattgaaacagacacaggcatgtcgtatcagcttagcaatggaaaagttgaaaatctgtggtttgaccataaggttgcgacagagcgccgcaccgtccgtgtaaaagtcgataagcactacgggtataatcatctgatgtatccgattggtgcggaaaccattcagccaaagcaggctgtctcacttgaaatgaacggcaacacggagcaaatttctccgatcagtgaacaagccggtgaaatcagaaatatgggaaattatactgtaacgtacaattccccggtctataagctggatgaactgagaaaggtaaaagtgagaaaaaacagtgaggagtacacattcagcgatcgctacatgcagcttccagattcactgccagagcgggtgagaacccttgcgatcaaactgactcaggatcacgacaatatgtttgataaggtgaaagcggttgaggactatttagggtcaaatgcgttcacatatgaaacagaaaacgtgaccattccgaagaatgatgaagattatgtcgatcaatttctctttgaaacgaaaatgggttattgtgataacttttcttccgccatggtggtgctcttgcgctcggccgggattccggcccgctgggtaaagggttatacgtccggcgaatacaaagaagcaggaaacaaaaatggcaacatctacgaagtgacaaataacaatgcccattcctgggtagaggtgtatttcccggaacagggctgggttacatttgagccgactaaagggtttacaaatccggctgaatttacttcttctcacacaaaggactccggcaacgataacagcagctcgccgaagaaagcaaaacagaaagaagaggaaaaacagccgcaaaaagaggaaaaacaaaaggaaaagcgggagccagctgtttctaaaaagccgtccgcttcgcatactaatgccggtgcgggcttgtatgcagcgcttgcggttcttgcagtcctcttggtggcagctgtattgctgtatgttttccgctcgttatggattcctgttttcaccgtgaggaaattgaagcggcgcagcgatcagcacgcgttttttgaggcatatgacgcgctgctgaaacaactgaagagaaaagggctgccgaaacgaggcagtgaaacgctgcgtgattatgcaaaacgaatcgatgaaaaatacgacatagaagacatgtcaaagctgacattaagctatgaaagggcgctttacagaaatgaagattcttcagcgctttggaatgattccagagagttatgggaaaatttaattaaaagaagatggtcttgaccgcttatcaacgtgttgttagaattagtgaatattatcggagtctgggagcgagttggcctgactccggcaaacggccttgccaaagagggcggagcgagcttcatatctgtcctcgtttttttctgtgtcaaaaaacttagaggagattaggtgacaaccatgacaaagttagtgaatgaaatgattcttgtccttgatttcggcagtcagtataaccagctgattacacgccgtatccgtgaattcggtgtttacagcgagctgcatccacatacattgacggctgaagaaattaaaaaaatgaatccaaaaggaattattttatccggcggtccaaacagtgtgtatgatgaaaactctttccgctgtgacgagaaaatcttcgagcttgatattcctgttttgggaatttgctacggcatgcagctgatgactcattaccttggcggtaaagttgaagcggcaagccagcgtgaatacggaaaagcaaacatccgcatcgaaggcacacctgatttgttcaaagatcttccaaacgaacaagtggtttggatgagccacggcgatttggttgtagaagttcctgaaggcttcactgttgacgcgacaagccatcactgcccgaactcagcaatgagcaaagcggacaaaaaatggtatggcgttcagttccacccggaagtgcgccactctgaatacggcaatgatcttctgaaaaactttgtattcggtgtttgcgaatgcgaaggcgaatggtcaatggagaactttatcgaaatcgaaatgcaaaaaatccgtgaaacggtcggagacaaacaggttctttgcgcgctaagcggcggcgttgattcctctgttgttgctgttttgattcataaagcgatcggcgaccagctgacttgtatctttgtagaccatggtcttctccgtaaaggcgaagctgagggtgttatgaaaacattcagcgaaggctttaacatgaatgtgattaaagtagacgcaaaagatcgattcttaaacaaactaaaaggcgtttctgatcctgaacaaaaacgcaaaatcatcggtaatgaattcatttacgtgtttgatgatgaagcggacaagctcaaaggcatcgactaccttgcacaaggtacgctttacacagatatcatcgagagcggtacagcaacggcgcaaacgatcaaatctcaccacaatgtcggcggacttcctgaagacatgcagtttgagctgatcgagccgttaaatacgctcttcaaagacgaagtgcgcgcgcttggcacagagctcggcattccggatgaaatcgtatggcgtcagccgttcccaggaccgggactcggaatccgcgttcttggcgaagtaacagaagaaaaacttgaaatcgttcgtgaatcagatgcaatcttgcgtgaagaaattgcaaatcacggcttagagcgtgatatctggcaatacttcactgttcttcctgacatccgcagcgttggtgttatgggtgacgcaagaacatatgattatacaatcggaatccgtgccgttacatcaatagacggcatgacatcagactgggcacgtatcccgtgggatgtgcttgaagtcatttcgacacgtatcgtaaacgaagtgaagcacattaaccgcgtggtgtacgatattacaagtaagccgcctgcgacgattgagtgggaataagtaaataacaatgagaaaaacgtccctttttcaaaaggggcgtttttttgttaactttttgaaaccgtttcgacaatttttgtatctaacaacataggaggtggataaggtgaaggaagacagattgattacaaaggcgagaaaaggaaatgctcgggcctttgaaaagcttatgctggcacatcaggagactttatataaaacagcttatctctatttaagaaataaagaagatgcacttgatgctgtacaggaaacggcttataaagcttttataggtatagaaaaactaaaagagccaaagtactttttaacgtggctcacccgaattcttattaattcaatttttgcaatgaagaaaaagaagggggaattagttccgtttgaaagccatcatgacactggcacggaccaaaggaatattgaagaatatatagacttgcgcaatgcgctggatacacttgatgaacatgttcagttaacaattcagctctattattttcaagattattcgatttcaatgatagctgaacaaacaggaatggcagaaggcacaattaaaacccatttacatagagcgagaaaagcattgaaacaggagctggaaaaggaggatcaaaacaaatggacaaacaccaaatgaagcagatatttgataacattgaagtgccaaagaaagtactcaaaaaggcaatacatcaagctgtcgttcgtgctgaaaatgaaagtaacacaaggcgccgttttaaatgggcacgaactattacaaatggaatggctattgctgctgtggtatgtatattgtatttatcatctggtctttttcttccctctgtaaacaaagcgatggggagcatacccattgtcggacaaatttataaggattttcaagataaagttggtctatcattgtttaaaagcaatttggtcacagctttaaatgaaaaagcagactccaggggaatcactgtttcggtaaacagctcctattacgatgccgggcagcttgtgtataactttactgttgataacctccagtctgatgaaaaagagctcagttataatgtgagtaaagcgagttttaacaataatttttcaatcaactacgattccttaatgctcaaaaaattaaataacaaacaatatgctggtcaattaaggctttatacaaaagggacagaaataaaaaatggggataccgtgccttttgtgattactcatatcaatgaaatacagggaaattggagattcaaactgcctattaccaaaaagaatgcgagttatttagaaagctcaaaagtggtatcagtgcttaacaatcattatcaattttccaatattcaagtggagaacggaaagctcggatctgtccttcaatttacaatcgattatcaaggcgtagcaaagcatgatacggttgaaattaacgaagtcaaagatgatttaggaaacacatatgagatgacagcgtcaaacatccaacttggagaccgcaaaaaagtaaacgagagaacggtaagagcaaaaggacaaacacagttagaatcaccaattaatccaaaggcaaaaaagctaacattaatagcaaatattaaatctgaggcagagggcagtgaaattgtcccgctaaatgcagagatgccgtttcatgtttcagaaacaaaccatcaaaacatagggattgaaatcaataacattaaccaaataggaaagaaagtattggttcattaccatttcactggaattgatacctcaagcgtggacgaaaataaattagtgaatatcggtgaaacgattggccttggtgatataaaaaaaatgcaatcttggcctgatccagtaggtgattatgaagaaggttattatttgaaatggaataaagctgaagtgaagaatatggacacagccgaaatggtatctacttttgaactggatgacgcttatcttgataagctgtctttaaagcattttgagtttaatgaatacggtctgtatattgataaaggcgttttaaatgacctgattcaactaaagccattctcgtttactgtaccagtgcatcaggtgagtcagcctaccgaaaaaaaataatcataagttgaaaagccgtatgttgccatacatacggtttttatcattgttaccaatttagtcaatagacgaataaaccaatttttttaataagtaatgttcgttgtttatattgtcaattcaaaatgaacttggtacaatagacacagaaatcaaataagatgaattcgtataatcgcgggaatatggctcgcaagtctctaccaagctaccgtaaatggcttgactacgtaaacatttctttcgtttgatataaataaaacacgtttatttattcaaactgaaatccgtctgtagtcaagcgtcccaaaattattggggcgttttttatttggcgatttcaggacagaataaatagcaaagagtgaagggagtcaaatagcttgaaaaagtattttcagtttgatgagctgggcaccagctatcgcaatgaaatcattggcggattaacgacttttttatctatggcatatattttgttcgtcaatccgattacgcttgctttggacagcgtgaaagattttccggaggcgctgagaattgaccagggtgcggtctttacggcgacagcgctggcgtctgcagcaggctgtatcttaatgggattaatagcgagatatccgattgccatcgcgccgggtatggggctgaacgcgttttttgcgttttctgttgtccttggtatgggtatttcatggcaggcagctttgtctggtgtttttatttcaggtcttattttcgttgctctttctttaacaggttttcgtgaaaaaatcatcaacgccattccgcctgagctgaaattggcagtcggtgcggggatcggcctgtttattacattcgttggcttacaaggctcaggaatcattactgcaaatccttctacgctcgtcacgatcggaaacattcacagcggtcctgtgctgttaacgattttcggtgtgattgtcacggttattttaatggtgcttcgcgtgaacgcaggcgtgtttatcgggatgctgttaacagcggtagccggcatgattttcggtttggttccggttccgactcaaattatcggcagtgtgccaagccttgcgccgactttcggacaagcgtggattcacctcccggatattttctctgtacaaatgctgatcgttattttaacattcttgtttgtcggattttttgatacagctggtacacttgttgctgtggcaacacaagctggtttaatgaaggaaaacaaattgccgcgtgcgggccgtgcgcttttagctgattcatcttctattgtgatcggtgccgtgcttggtacgtctacaacaacttcttacgtggaatcaagctcaggtgtcgctgcgggtgcccggtcaggatttgccgcaattgtaacagggattctctttttactggctacgtttttctcgccgctcctatcagtcgttacgtcaaatgtaacagcgccggcgcttattattgttggtgcattgatggtggcgccgcttggcaaaatcgcttgggataagttcgaggtggccgttcctgctttccttaccatgatcatgatgccgttaacgtacagcatcgcgactggtattgccatcggatttattttctatccgattacaatggtgtgcaaaggaaaagcaaaagaggttcacccaatcatgtacgggctgtttgtcgtatttatcctgtactttatcttcttaaaataaggaatgaaaaaccagctgcaccggcagctggtttttttgttgcaatagataaaaccatttcatacgatataccgtcatgtagatgtgccgccatgctttacttaaatggaaatgacttgactgttcaggaaggcttcggtaccttatataagtgttttattttcttgctgaatggtattccgccgtatttttttgataggagttgctgacatgacggaagaaagaaaagaaacgtttgaagaagaaattaaccagagtgaaagaatagatgcagatgaagaaccgctatcgagaatgtccagaaaggcgagccggcaaagcaagcagaagcaaaaacaaaaacagaaaccgcgccaggaacgcggtgaatcaactgttaaagtcaagcttgcgtctgtttgggcagccatcaacagatattgcggttttgcgttctcgattttaaaatctccggcgaaaactgtcgtaacggatggtttttctcattataagtacggtctgatttcaatgcttatattcagtatcattttttcaattgggaattggtttcagttaaaggcaagctggaatcggccgctcggtttcggagaacgccatcatgctttctatgacgggtttttagttgttcttgtgtatttgctgatctttttcgcggtaatggtctttgctatatgggctgtctcccgctatatgatgaagcagaaggtgacgttcagagaagcggctgccgtattgggttcattgcttgtaccggtaattgctgtttcaatcctttggctgatctttgcgatcgtaaatattccaatgctgacagtactgtttacggtgctgatcttgttttccatcttttttatcatcgcgctgtatgtacagcgtgtgtaccaggcggcacaagatgcaccaattgattatatctattgtgtatttgcagtggttgcgatagcgctgctgtttacggcagtgacttggccgtttatttctgaatattttacggcgtcgctgattccgctttaatgaaaaaaccggctaatcctagccggtttttttatgtcacactttttacaaatatatctaaaaaacatagttgatttgtaggattaacccgtgtatgatggggaaaatgctgaaaacgtccagcgcaaaaacctttatgtttaaggaggatgatggacatggctgatgtgcttcgccgagcaattaaccaaaagaagcaatttttaaaaaccaaattactgctctcggaattttatcaaggaagaggggaacagcttgcggactacacgctgagtgagcttgagaaagaatacaagtcccttcagaaaatgaaaaaagagatctgacaatagatataaagaggtgagtctgctgaaaagcgggcttttttgttttgattttgaaaaggcgagaaagagggtaaactactactgttcaacgcataaaagcatgtcgaaatattttgcttaagcttacgggcgaagctgattgtaaacggctcatttctctagtagaatatgaatgctttgtgcaagctgaagagtagggggatgaataaaatgatgcaaaccatcttatcaaatgggatagccatggttctcataattctcattattaatattgtctatgtgtcattttttacgataagaatgattttaacgctgaaaggacagcgttatttagcggccggcatcagtacgattgaaatactggtttatgtgacagggctgagtctggtgctcgataacttagatcagattcaaaatgtaatcgcgtacgcgctcggttacggtcttggcgtaattgtcggcatgaaaatagaagaaaaattggcgcttggctatattatggtcaatgtgattacgaaggagctcgatcttgatcttccgaagcagctccgcgaaaaaggctacggcgtgacaaattgggtggcaggcgggcttgaaggcgaccgcacagcccttcagatcctgacgccgagaagatatgaactccagctatatgatacgattaaaacacttgattcaaaagcctttattattgcgtacgaaccaaaaacaatccacggcggcttctgggtcaaagcggtgaagaagaggagaattaaagaataatggcaaagccgaagaagaaaaagtttgaagtgacagagcagcaaacgattgatgcggtgcttcagcaaatgaaagaagaaggatatctgcctgtaaggcgaatggaagagcctatttttatggaaaaaaaggaaaatgggtcaattcagatcgttccgtgcgggaaaaaaatcgtatttgaagggaaattgatctaaaacacgaacattagtagaaagaatttttgtatcgttcgataatatcgttgacattatccatgtccgttgttaagataaacatgaaatcaaaacacgacctcatataatcttgggaatatggcccataagtttctacccggcaaccgtaaattgccggactatgcaggaaagtgatcgataaaactgacatggatatatcgcagaagcgaacgactgacgatacatgtaccatgcccggtttgtattgcttcctcataagtgcaatgcagagcgggtattttttattttctgaaaacaaaagcattagaaggtggggaacagaatgcagccgctagtaggaatcatcatgggaagcacttccgattgggagacaatgaaacacgcatgcgacatacttgacgaactcaatgttccgtacgaaaaaaaggtcgtttccgctcaccggacgcctgatttcatgtttgaatatgctgaaactgctagagaaagaggcatcaaggtgattattgccggtgccggaggagcggcgcatctgccagggatgacggctgcgaaaacaacactgccagtcattggagttccggttcagtctaaggcgctgaacggaatggattcacttctttccatcgtccaaatgcctggaggcgtgcctgttgcgacaacatccatcggcaaagcgggtgctgtgaacgcaggcctgttagcggcgcaaattttgtcagcatttgacgaagaccttgcccgtaagctggatgagagaagagaaaatacaaaacagacagtgttagaaagcagtgatcggcttgtctaaacaaatcatctatccgggagctgtaatcggcattatcggcggcggccagcttgggaaaatgatggctgtgtccgccaaacaaatggggtataaagtcgcggtcgttgatccggtgaaagattcgccgtgcgggcaggttgcggatatcgaaattaccgctcattataatgaccgtgaagcgattcgaaaattggctgaaatcagcgatatcatcacatatgagtttgaaaacatcgactatgatgcgctgcattggctgaaagatcatgcgtatctcccgcaaggaagtgagctgctgctcattacccaaaaccgtgaaacagagaaaaaagcaattcaatccgcgggctgtgaagtcgcaccgtacagcatcgtcaaaacaaagaatgaattgaaacaggcggtacaggagctcgggttacccgcagttctgaagacatgccgcggcgggtacgacggcaaaggccaatttgtgataaaagaagaggcgcaaatggagcaggcagccggtctgttagaacacggaacttgcattcttgaaagctgggtttcttttgaaatggaactgtcggtgatcgtcgtcagatcggtaaacggtgaaatttcaacatttccgacagctgaaaacattcaccacaacaatattcttttccaaagcatcgtgcccgcacgggtagagaaagggattcagcagaaggctgctgatctcgcagttaagcttgcagatgagcttaaccttgtcggaccgcttgctgttgagatgttcctgacagaggacggagagcttttggtcaatgaactggcgccaagaccgcacaattctgggcattatacgctggacctttgcgagacgagccagtttgagcagcatatcagagcggtatgcgggcttccgcttgggaagacagatttgctgaagccgggcatgatggtgaatcttctcggcgatgaagtgaagcttgtggaggaagacccggagcttttaaaagaggcaaagctatatatatacgggaaacatgaaatcaaaaaaggccgcaaaatggggcatattacatttatgaagcagcctgaagacgaatggattcaggagatcacaaataaatggatgaatagagacggaggacaagcagaatgatcgaacgttattcaagacctgaaatgtccgcgatttggacggatgaaaacagatttcaagcatggctggaggtagagattcttgcctgtgaagcgtgggcggagcttggcgtcattccgaaagaagatgtaaagattatgcgcgaaaacgcgtcatttgacatcaaccgcattttagaaattgaaaaggacacgcgccatgacgttgtcgcttttacacgcgctgtttccgaatcattgggcgaagaaagaaagtgggtgcactacggattaacgtcaactgacgttgttgatacggctctttcctacttattaaaacaggcaaacgatattttgctcaaggatcttgagagatttgttgacattataaaagaaaaagcgaaagaacataaatacacagtcatgatggggcgcacgcacggcgtacatgctgagcctacaactttcggcttaaaacttgcgctttggcatgaagaaatgaaacgtaatcttgagcgcttcaaacaagcgaaagcaggcatcgaggttggaaagatttctggcgctgtcggcacatatgcgaacattgatccatttgttgaacaatatgtctgtgagaagctcggattgaaagcagcaccgatttcaactcaaacccttcaacgtgaccgccatgctgactatatggcaacacttgctttgatcgcgacaagcattgagaaattcgctgtggaaatccgcggactgcaaaagagtgaaacacgtgaagtagaggaatttttcgcgaaagggcaaaagggttcatctgcaatgccgcataaacgaaatccgattggctctgaaaacatgacaggcatggcgcgcgtgatccgcggctacatgatgacagcttacgaaaatgttccattatggcatgagcgcgatatttctcattcttcagcagaacgaattattcttccggatgcgacaattgcgctgaactacatgctgaaccgcttctccaacatcgtgaagaacttaacggtcttcccggaaaacatgaagcgcaacatggaccgcactctcggccttatctattctcagcgtgtgctgcttgctttgattgacacaggccttacacgtgaagaagcctatgatactgttcagccgaaagcaatggaagcgtgggaaaaacaagtgccgttccgcgagcttgttgaagcggaagagaaaatcacgtcacgtctttctccagaaaaaattgctgactgctttgattacaattaccatctgaaaaatgttgatctgatctttgaacgtttaggtttagcatagaagaagcttttagcggcttcttctaagccgccgatgtttgaaaattcccaacattcgggttaggaggccttccgtgaatattgtgaagaatgaacttttatacgaaggaaaagcaaaaaagatctacaaaaccgatgacgaaaacacgctgtatgtcgtgtataaagactccgccactgcctttaacggcgagaaaaaagcagaaatcagcggaaaaggacgcttaaataacgagatttcaagcttgattttcaaacatcttcatacaaagggcattaacaatcactttatcgagcgcatttcggaaacggaacagctcattaaaaaggtaacgattgtgccgcttgaagtcgtggtcagaaatgttgtggcaggaagcatgtccaaacgtctcggcattccagaaggcacggagcttgagcagccgattatcgagttttactacaaggatgacgcgctgggtgatccgctcatcacagaagatcatatttggcttttgaaagcggcgactcctgagcaggtagaaaccattaagtccattacaaaaacagtaaatgaagagcttcaaagcattttcgacgattgtcatgtcagattaatagatttcaagcttgaattcggtttagatgcagaagggcaagtgcttttggcggatgaaatttctcctgacacatgccgcttgtgggataaagacacgaacgaaaagctggataaagatttattcagacgcaatctgggaagcttaaccgacgcatacgaagagattttcaaaagactgggaggcattcatcatgtataaagtaaaagtttatgtcagcttaaaagaaagtgtactagatccacaagggagcgctgtccagcatgccttgcacagtatgacttacaacgaagttcaagatgtgcgcatcgggaaatacatggagcttaccattgaaaaatctgaccgtgatcttgacgtgctagtgaaagaaatgtgcgaaaaacttcttgcgaacacagtgattgaagattacagatatgaggttgaggaggtagtcgcacagtgaaatttgcggtgattgtgttacccggctccaactgtgatatcgatatgtatcatgctgtaaaggatgagctcggccatgaagtggaatacgtctggcatgaggaaacaagtcttgacggcttcgacggtgtgttaattccgggagggttttcttacggcgattacttaagatgcggcgccatcgcccgatttgcgaatattatgccagctgtcaaacaagcagcggctgaaggaaaacctgttcttggcgtctgcaacggattccagattttacaggagcttgggctgctgccaggcgcaatgagacgcaacaaagatctgaagttcatttgtcgtccggttgaattaattgttcagaacgacgaaacattattcacagcttcctacgaaaagggagaatcgattacaatcccggttgcccacggtgaaggaaatttctattgtgatgacgagacgcttgcttcattaaaggaaaacaatcaaattgctttcacatacggctctaatattaatggaagtgtcagcgacattgccggtgtcgtgaatgagaaaggcaatgtattaggcatgatgcctcaccctgagcgcgcggtcgatgaactgcttggaagcgccgacggtcttaaattgttccagtctatcgtgaaaaattggagggaaactcatgtcactactgcttgaaccaagtaaagaacaaataaaagaagagaaactgtatcagcaaatgggtgtcagtgatgatgagtttgcattgatagaatccattcttggaagattgccgaactacacagaaatcggaattttttctgtcatgtggtctgagcattgcagctataaaaactcaaagccgattctgcgtaaattcccgacaagcggcgagcgtgtgctgcaggggccgggggaaggcgccggaatcgttgatatcggtgataaccaagcggttgtgttcaaaattgaatcacataaccacccatcagctctcgagccttaccaaggcgctgcgactggcgtaggcggaattatccgtgacgtattttcaatgggtgcccgtccaatcgctgtattgaactctcttcgatttggtgaactgacttcaccccgcgtgaagtacttgtttgaagaagtagtagcgggtatcgccggatacggcaactgtatcggcatcccgacagtcggcggagaggtacaatttgacagcagctatgaaggaaatccgcttgtcaatgccatgtgcgtcggtttaatcaatcatgaagacatcaaaaaaggccaggcgaagggtgtcggcaataccgtaatgtacgtaggagcgaaaaccgggcgtgacggaatccacggcgctacgtttgcttctgaagagatgtcagactcatctgaagaaaagcgttctgctgtccaagtcggcgatccgtttatggagaagcttttgcttgaagcgtgtctggaagtcatccaatgcgacgccttagtcggcattcaggatatgggagctgccggtttaacaagctcaagtgcagaaatggcaagtaaagccggttctggtattgaaatgaaccttgacctgattcctcagcgcgaaacaggcatgagcgcgtatgaaatgatgctttctgaatcacaggaacggatgcttttggttattgagcgcggacgtgagcaggaaatcatcgatatttttgacaagtacgatcttgaagcggtttctgtcggacgtgtgacagatgataaaatgcttcgcctgacacacaaaggagaggttgtgtgcgagctgcctgttgatgccttggcagaagaagcaccggtttaccataagccttctcaagagcctgcttactatcgcgagtttttggaaacggacgttccggctccgcaaattgaagatgcgaatgaaacgctgaaggcccttcttcagcagccgacgatcgcgagtaaagagtgggtgtatgatcagtatgactacatggtgcgcacgaatacagttgtcgctcctgggtctgatgctggtgttctcagaatccgcggaacgaaaaaggcgctggcgatgacgacagactgtaacgcgcgttatctctatcttgatcctgaagtcggagggaaaattgctgtcgctgaagcagcgcgcaacatcatttgctcaggcgcagaaccgcttgcggtcacagataaccttaacttcggaaacccggagaagccggaaatcttctggcagatcgaaaaagcggcagacggcataagcgaagcgtgcaatgttctcagcacaccggttatcggcggtaacgtatcgctttataacgaatcaaacggcacggcgatctatccgacaccagttatcggcatggtcggcctaattgaagatacagcgcacattacaacacagcatttcaaacaagcaggagatctcgtatacgtgatcggcgaaacaaaaccagagtttgcgggaagcgagctgcaaaaaatgacagaaggccgtatttacggcaaagcgccgcaaatcgatcttgatgtagagctgtctcgtcaaaaagcactgcttgacgcgattaaaaaaggcttcgttcaatctgcgcatgatgtgtctgaaggcggcttaggcgtagcgattgcggaaagtgtcatgacgacggaaaaccttggcgctaatgtgactgtagaagggggagcggcattattattctctgaatctcaatcccgcttcgtcgtttcagtgaaaaaagaacaccaagaagcgtttgaagcaactgtcaaagatgcggttcatattggtgaggtaacagctgacggaattctggcgattcaaaaccaagacggacaacaaatgattcatgcgcaaacgaaagagcttgaacgcgtatggaaaggagctatcccatgcttgctgaaatcaaaggcttaaatgaagaatgcggcgtttttgggatttggggacatgaagaagccccgcagatcacgtattacggtctccacagccttcagcaccgaggacaggagggtgctggcatcgtagcgactgacggtgaaaagctgacggctcacaaaggccaagggctgatcactgaagtatttcaaaacggcgaactcagcaaagtaaagggaaaaggcgctatcgggcacgttcggtacgcaacggctggaggcggcggatacgaaaatgttcagccgctcctcttccgttcccaaaacaacggcagcctggcgcttgctcataacggaaatcttgtcaatgccactcagctgaagcagcagcttgaaaatcaagggagcatctttcaaacctcttcggatacagaggttttggctcacctgatcaaaagaagcggacacttcacgctgaaggatcaaattaaaaactcgctttctatgctgaaaggcgcctacgcgttcctgatcatgaccgaaacagaaatgattgtcgcacttgatccaaacgggctgagaccgctatccatcggcatgatgggcgacgcttatgtggtcgcatcagaaacatgcgcatttgacgtcgtcggcgcaacgtaccttcgcgaggtagagccgggagaaatgctgatcattaatgatgaaggcatgaaatcagagcgtttttccatgaatatcaaccgttccatttgcagcatggagtacatttatttctccagaccagacagcaatattgacggtattaacgtacacagtgcccgtaaaaaccttggaaaaatgctggctcaggaatccgcagttgaagctgacgtcgtaaccggggttccggattccagtatttcagcggcgatcggctatgcagaggcaacaggcattccgtatgagctcggtttaatcaaaaaccgctatgtcggcagaacgtttattcagccgtcccaggctctgcgtgagcaaggcgtcagaatgaagctgtctgcggtgcgcggggttgtagaaggcaaacgcgtcgtgatggtggatgactctatcgtacgcggaacaactagccgccggattgtcacgatgcttagagaagcgggtgcgacagaggtgcatgtgaaaatcagttcaccgccgatcgctcatccgtgcttttacggcattgatacttccacacatgaagaattaatcgcgtcttcgcattctgttgaagaaatccgtcaggaaatcggagccgataccctctcatttttgagtgtggaagggctgctgaaaggcatcggcagaaaatacgatgactcgaattgcggacagtgtctcgcttgctttacaggaaaatatccgactgaaatttaccaggatacagtgcttcctcacgtaaaagaagcagtattaaccaaataaaacttgaaaaatgacataaaggcagcgcagttcggctgcctttctctttctgccctcattcggggagatattttgaaaagcgccttaaaggagtgaataggatgtctgaagcatataaaaacgcaggagttgacatcgaagccggatatgaagctgtaaaacgaatgaaaaaacacgtggagcgcacgaaacggcttggcgttatgggcagccttggcggttttggcggcatgtttgacctgtctgagctttcttatcaaaaaccagttctcatttcgggaacggacggtgtcggcacaaaattaaagctcgctttttccatggataagcatgacacgattggcgtggacgctgttgcaatgtgtgtcaatgacgtgctggcacaaggtgcagagccgctgtttttcctcgattatttagcggttggcaaagcggacccagtgaaaattgaacagattgtacaaggtgttgcggaaggctgtgagcagtcaggttcagccttagtcggcggtgaaacggctgaaatgccggggctctatacagctgatgaatacgatattgccggtttctcagtcggagtggcagaaaaggacgaaatcgtgactggagaaaacattgaagagggccatctgttgatcggtctcagctccagcggccttcacagcaacggcttttcccttgtcagaaaagtgcttctggatgatgcggagctggacctcgatacaacatatgagccgtttgaacgcccgcttggcgaggaattgcttgaaccgacaaggatttacgtgaagcctgtgcttgccgcggtcaaaagcggaaaaatcgacggcatggcgcacgtgacaggcggaggatttattgaaaatattccgcgtatgcttccggaaggcttaagtgcggaaattgatcatggctcatggccgatcccgccaattttttctttcttgcaagagtacggcaagctaaaggaagaagacatgttcaacgtctttaatatgggtatcggttttgttttggcagtcaaagaagagcatctgacagatgtgatcggaacgcttgaaagccatggcgaaaaagcctatttaattgggcgtgtgaaaaaaggtgaaggcgtcacattcggcggtgcggcactttcatgaaaaagtttgcggtatttgcatcaggaaacggttcaaacttcgaagccatcgtcacgcgtttgaaggaggagaactgggatgcgtcagcagcgctcctcgtttgcgacaaaccgcaggcgaaagtcatcgaacgggcggaagcattccacattccatccttcgcatttgagccgaagtcttatgaaaacaaggctgcatttgaacaagccatcattgaacagcttcgtcttcacgaggttgaattgattgttcttgccggctatatgaggctgatcggtgatacgctccttcaagcatatggaggaaaaatcattaacattcacccgtcgcttcttccggcgtttcctggaatcgacgcagtcggacaggcgttccgggcgggtgtaaaggtggccggaatcaccgtgcattatgtcgatgaaggaatggatacaggtccgatcatcgctcaaaaggctatcgaaattgatgagcatgatacattggaaacaatcgaacagcggattcacaagcttgagcataaatggtatccgagtgtgattaaacagctattaggattaaataacagaggtgaaaaggcatgaccattaaacgtgcattaatcagtgtttcagataaaacaaatctcgttcctttcgtaaaagaactgacagagcttggcgttgaagtcatctccacaggcggaacgaaaaagcttcttcaagaaaacggtgtggatgtgatcggaatttctgaagtgacaggctttcctgaaattatggacggccggttaaaaaccctacacccgaatattcacggcggccttctggcggttcgcggcaatgaagagcatatggcgcagatcaatgaacacgggattcagccgattgacctcgttgtcgtcaacctctatccatttaaagaaacgatttctaaggaagacgtcacatatgaagaagcgatcgaaaatatcgacatcggcggacctggcatgctgcgtgcggcatcaaagaaccatcaggatgtcacggttatcgtcgatccggccgattacagcccagtgctgaatcaaatcaaagaagaaggcagcgtatctcttcagaaaaaacgcgagctcgcggcaaaggtattccgtcatactgcggcatatgatgcactgatcgctgactatctgacaaatgttgtcggtgaaaaagaaccagagcaattcactgtgacatttgagaaaaaacaatcgcttcgctatggagaaaacccgcatcaggaagcaactttctatcaaacagctcttcctgtcaaaggctccattgcgcaagcagaacagcttcacggaaaagagctttcttacaacaacattaaagacgcggatgctgcagttcaaatcgttcgtgaattcactgaaccggctgctgttgctgtgaagcatatgaacccgtgcggcgtgggaacaggaaaaacgatcgcagaagcgtttgacagagcgtttgaagcggataaaacatctatcttcggcggcattatcgcgctgaaccgtgaagtggacaaggcaactgccgaagcgcttcacaacattttcttagaaatcatcattgcgccttcattcagccaagaagcgctcgacgtcctgactgcgaagaaaaatctccgtctgctgacgcttgacgtatccgccgctgttcaaaaggaaaaacagctgacatccgttcaaggcgggctgctgattcaagatttagatatgcacggcttcgatgatgctgagattagcattccgacaaaaagagagccgaacgagcaagagtgggaagacttgaagcttgcttggaaagtcgtgaagcatgtgaaatcaaatgcgattgttctcgcgaaggacaacatgacagtcggcgtgggagcaggccaaatgaaccgcgtcggatcggcaaaaatcgcaatcgagcaagcaggggaaaaagcgaagggcagcgcgctcggttcggatgcatatttcccaatgccagatactgtcgaagaagcggcaaaagcgggcgttacagccatcattcagccaggcggatcgatccgagatgaggattccatcaaaaaagcggatgaatacggcattgccatggtattcaccggcatcagacacttcaaacattaaggggatgaaaacgacgtgaatgtattaattatcggtaaaggcggaagagaacatacgctggcgtggaaggcagcgcaaagcagcctcgtcgagaatgtatttgcagctcctggaaatgacggcatggaagcttccgcacagcttgtaaacattgaggaaagcgaccacgcagggcttgtctcgtttgcaaaagaaaaccaggtcggcctaaccattgtcggccctgaggttcctttgattgaaggtctggtggatgaatttgaaaaagcgggtctgcgcgtgttcggcccgtcaaaagccgcggcgatcatcgaaggaagcaaacagttcgctaaggatttaatgaagaaatacgacattccgaccgcagaatacgacacgtttacatcctttgatgaggcgaaggcatatgtgcaggaaaaaggtgctccgattgtgataaaagcagatggacttgcagctggaaaaggcgttactgtggctatgacagaggaagaagcaattgcatgtctgcatgactttcttgaagatgaaaagttcggtgatgcgagcgcgtccgttgtcattgaagaatatctttctggtgaagaattttctctgatggcctttgtcaaaggggaaaaggtgtatccgatggtgattgcccaggatcacaagcgtgcgtttgacggagacaaaggtccgaatacaggcggaatgggcgcttactctccagttccgcaaatttcggaagaaacggttcgccatgctgtagaaaccatcgtgaagccggccgcaaaagcaatggtacaagaaggccgttccttcactggcgttttgtacgctggattgatgcttactgaaaacggctcgaaggtcattgaatttaatgcccgtttcggcgatccggaaacacaggtcgtgcttccgcgcatggaatctgatctggtacaggtgcttcttgatcttttagatgataaggaagttgacttaagatggaaggataccgcggcagtgagtgttgtgcttgcatcagaagggtatccggaaagctatgcaaaaggcacgccgatcggcagccttgcagcagaaactgagcaggtcgtggtcttccatgccggaacgaaagcagaagatggagagttcgttacaaacggggggcgcgtcgccaatgtgacggcttttgatgaaacgtttgaagcggctagagaccgagtgtacaaagcggttgatgaaatattcaaaccgggactctttttcagaaaagacattggggcacgcgctttaaaggctgcccaaaaataagtgaggaaaacccgcagaatagctgcgggttttttgttatcaaaaagcgggatggcagctggaagaagaaaggacaacgagcgtggttggttttccatgggccatcgaggcgtcaataaaatcctcaagcgtatgtaccgattcagtcacgacctttgtcacatagctgtacatccctgtgatgcggtggttttctgctacatcagggtgcgcttttgcaaaggcggcgtagtgcttgcagcttttcggctccatgagaatgaaagcggtgacatgcttgtttagtttttcataacagatattcgcgctgtacccggtaatcactcctttgtcttcaagcttcctgacacgctccgccgcgcttggcgaactgagtccgacaagctttcccagctcaaccatcgttaatctgccgtttcgctgcaaatgcgagagaatctgaaggtctgtatcgtccatttgtccggctcctttacatatttaggcgaatgaatgaaaattcctttgatcgtaaggtaatgctgttgatttaacttcattgtagcatatggatgccgtcttattttttctataataaagccatcaatcagagaggaggcatcatgttgccagaattacagcgctctattacttggatacaagggacggcgttaacgattggggcggttttaggatgcgggatattaatcctgccgtctgtcactgcggatacggccggtccggcttctttatttgtctgggtattcatgtcttttttatcttttcttctcgtcggcacgctggcacggcttgtgaaaattgcgcccagcgcgggaggaatcactgcttatgtgcagctggcctttcagaaaaaagccggggctattttgggctggatcatgttaggttccgttccgattggcgttcccatcatcgctttgactggcgcgcattacgtcagttacatcacagaggcggccgattggcagattacattgattgctggttgcatgctggctatatctattttgcttcatatgagaggcattcaactatcagcaaacatcagtacaatcgttatttgtgtcatcgtatttctgcttgtcacttctattgctgtgtcattgccacacgtcacgatagcagaattcaagccgtttcttccgcatggctggtctgccgctggatctgtttcagttatgatttttttctcttttgtaggctgggaaatgattaccccgttggctgaggaatttcatcgccctgaaaaagatgtcccgctcagcttgtttttggcagcgtcttgtgtggcagggctgtatatcatgctgtcatttgtgacggtggggactcattcatatggagagaatggagaaattgcatcgcttgccatgctcatttcaaaaggagcaggggaaagcggtgtatacgtcacggtatgtttagcgctgtttattacattcgctaccatccatgccaatattgctggtttttcaagaatggtgtacgcattggcgagagaggggcacatacccgtattttttggaaaactcagtgcgacaaaacgtacgcctatccgtgttttgacagcgatggccgcagtgtttggcttagtgcttgcggcgcatggtctgtttcaaatcgatttgacgactctgttgaaagggccgagcgcggcttttatcgcatcttacatatgtacaatggcggcagcactgaaactgctgggcaggagagatataggctggtggatggcgctcggggcatttgcggcgtgcgcggtgatttattcattcagcggctgggcactgctttatccggcagtgctggcagctgcaggatatttctatatgaaaacaaaggatgggcataaaaaaaagcttgatcacgttttgtgattaagcttttccatttatccgttttgatgctcgttatttccagaatcactgtgttgaaacatgtaggtcacaggacagaagcgcaagattcccgaacccgctttcatggcccccataaagatgtaaaagagatgcattctgcaccaaggttttttcgtaaactttgcactggcggctgacataatcgtcaatccgcaggcgattctgaacacggcattgatgagactgatgtttggcttcaaggaaatccgctccttttacttaaaaaagttttttaaccgaaccttcaaaaatttgtaacgtttttatcgtgcgtgatgaggaaggatgtgataccatgagtctaatacatgtaaaggagagtatgtgaatgtccgaacgcacctttaactggaaaaacaaagacatcagggcacaggttgatgttgtagactcaaagctgcttccaacgctccttttacggaatgctctcgtcttaaatccatatgtaaaacaatggctgaaaaaaaacatttggatttatcaggaccgcattgtttatgtgggtcatgaacttccgaatagagccgaagaaattcatacgattgattgtgaaggaaaatacattgtgccaggttatattgaaccgcacgcacatccttttcaaatatataatccccaaacactggcggaatatgtgtctcaatacggaacaacaacattcgtgaatgataacttatttttgcttttgcaaagcggaaaaaagaaagcgcttacgattttgaatgaactcaaaaagcagcctgtccagtatttttggtggtcacgctatgacctccagaccgaggttctgaacgaggaccacgtccttccatttgacgtcagaaaacagtggattgaacatccggatgtgattcaaggcggagaaatgaccggatggcctcgcctggtagatggtgatgatttaatgctccactgcatgcaagctacaaagaaacagagaaaacgcattgaagggcattttcccggcgcttctgataaaacgcttacaaaaatgaagctgttcggtgcagattgtgatcatgaagcgatgtcaggtgatgaagtgatgagaaggctggaactgggctattatgtttcccttcggaactcttccattcgccctgatgtaagaaaaatcttgcaagagctgcatgagaagggcttccgctattatgaccacttcttttacacgacagatggcgcaaccccgaatttctataaaggcggcatgacaaacgagctgattcgcatcgcgttagaagaaggcgtacctgcaatcgacgcctacaatatggcatcatttaatatcgcaaagtattaccaaatggatgattatttaggagttgtcggaccgggtagactggcatcgctcaacatactggaagatccgttaaatccgaatcccgtgactgttctgtcaaaagggactattctgcgtgaagacggctgtgatttgaaggcgtttacaaaggcggactggcacaaaggtggtcttgtcccgcttgagctttcatatgatatgacgatggatgacttgcagttttctatgccgatgggcgtgaaaatgcggaatgcggttattatggagccgtatatgattgagattgacaattcgatggaacagctctcgtttgaccatgatgaaagttatttgacgatgctcgacagacacgggaaatggcgcgtcaatacgatgataaaagggtttgcctcaagcgtgcagggatttgtaagctcctttacgacgacgggcgacattgtcgcgattggaaaaaataaagcggatatgctgctcgctttcgcccggatgaaagaaatcggaggaggaattgttttagcggagaacggaaacattttgcatgaaatcccgcttgccctgtgcggctgcgcctcttcggaagcgtatgaagaagtgcttgagaaggaacaaaagctgagagatcttttgactgaaagaggctatgagttttgcgatcctatctatacgctgctctttttgcaaagtacgcaccttccgtatatacgcattacgccaagaggaatcttcgacgtcatgaaaaaaactgtactctttccatcgataatgcgttaaaatataaaagagcagggagccgacatatgaaaaaatggatgacagtttgcgcgctgtgtttcgtgttttttctgctggtatcctgccagcagaaggatgctgtcccggatactgcaaagaagctgaaagctcctttaacggggctaaagactgaacagaaagtgactgaacgccgccctgttgctgttgtggtgaacaatcacccgaaggcgaggccgcagtcgggtctgtctaaagccgacattgtcatagaagcgctagccgaagggcaaatcacaagatttctggccattttccaaagccagatgcctgaaactgtcggacctgtgcggagcgcgcgggaatatttcgtcactctcagcaatggctttgacagcatatttgtccatcacggctggagtcccggcgccaaaaagcagctggaatccggagctgccgattatatgaacggattggattttgacggaagcttattttggagagctgatttcagcaaaccgccccacaattcctatacgtcttatgattacataaaaaaggcggcagaacaaaagggttataagctgaagcaggaaacaaatccgctgctgtttcaaacatcagatgcaaaacctgcaaatgaatcttacaatgttcgggtagattatggaacaaaaaacgttacaaatcttgtcgaatacaactatgataaaaaagctgaatcttatacaagaagctctgatggtgtcataacgacagaccgggaaaccggaaagccggttgcaatgcaaaatattttcattgttgaagccagccatcatattattgatcaagatggaaggcgggacatcgacttggtatcaggaggaaaaggtctgttgtttcagcacggaaacgtcattgaaacagactggaaacaagtgaatggcagaattgtgccgataaaagacggcaagtggcttccgtttgtgccaggaaagacttggatcaatatcgtacctgatcttgatgcggcttccattagtaaaggagaaggtgtgtaacgatgcaaatcgataaattacgcggcaaagagctggaccagttatttaactcgatcttatcgctgaaagacctggaggaatgttaccgattcttcgatgatctatgcacaattaacgaaattcaatcgctggctcagcgccttgaagtggcgcgcatgcttcgcgaaggaaacacgtatcataagattgaaacagaaacaggcgcttccacggctacgatttcccgtgtgaaacgctgcttaaattacgggaatgacgcttatgaaatggcgcttgaccgtgtgaaggagacggaaactgagtcttcttcaaaataataaacaaccgccctgccgttcggcaagggcggtttctttatgaaacaaattgatggatcaggttgtcgatatcgatgatactgccatcctctttccgatagacaacatgctccttggaaaagtgaatcggcgaattgatccctgctgcggctgcaaggttaaatagtccctcgcgcaatgaaataacgtagttgcagacacgatgctgtttttcctcaacgctcagtgctttttgcaatttcggatctgtcgtcgccacacctgccggacatttgttggtgtggcagacgagagcgcggatgcagccaacggaaaacatcatgccgcgtgcgatgttgacaaagtcagcgccgagggctaaggcgaccgcgattttatcaggagtcaggagctttccggaagcaaagattttcagctggctgcgcaagccgtactgtttaagaagcgtgtcaacaataggcagcgctgtcataatcggaaggccgactgtatccgcgagctcgtaaaaggaagctccggtaccgccttcacttccatcgatcgtgataaaatccggatgttttccgcttttctgcatatgagagaaaagctcatgcaattcttcaggatgccctgcgaccagtttgatgccgactggcttttgtccgacatctctaagtttttcaataaagtcgagcatttcaggagggtttgagaattcataaaagcggttcgggctgtcaatcgactttccaggttcgacattccgaatgtctgccacttcctctgatactttggcgccatccacatggccgccccgggttttcgctccttgtgccagctttagctcaaacgctttaatctggtcaatcctgctttttcttttaaattcctcccacgaaaattccccgtttcttttgcgcacgccgaataggcccggtccgatttggcaaatgatatcggcgccgccctttaagtgatattcagacaatcccccttcacctgtattcatccaggtgccgcctgcctgatggagcccttttgagagcgccgtaacagcccgttctccaagagaaccgtagctcatggcagactggccgactaagcccttcacataaaatggcttctcgcatgtacgctcgccaatcacctgtacatcatcaggatggagaaaatacgggtctgccttgatatgttcggcatgctccttgcgtttgaacagattgtcagcatccattttatagatttgggtttcaattttgggcgtttgatttacgtgcatttcttccctttgttttggaaacatagcgttacggatataatagccaggtttatcaaaatctcttacagatccaaagcccatcattctgcttttgtatttgccggagatgacggtttgctcatattcctttcgtgaaaaaggctgctcctcattgtcattgctgtataaatactgtctgagctccggcccgattttttcaaggatataccgaaaccttccgatgacgggatagttgcgaagaattgagtgctcctgctgtttttcatcctttatgtagatccaggcaaacaagacgatcgggatagcgatgatccctatgataaatgcgatgagtgctattatgatggtttccatctctcagcctccctttttatgtaaccatttccacagttgaacactttccaaacaatagcagaaggaatctggtgaaaaatgtgtgcttctgccgatacaggactcagagagcaggtactgccatatgctctttttttatgaaaatagaatcaaaacacctttttcagtgaataacgagattaacggctttttccgtttttccgcgctatgtgaatttgttataatgtttaaatggtaacaaacgaatggaggaacgtatgacgtgtacgatgtaacggagtggaagcatgtctttaaactcgatccaaataaagatttgcctgacgaacagctggagattctttgcgaatcaggaacggatgcggtcattatcggaggcagtgatggtgtaacagaggataatgtcctgcggatgatgtctaaggtaagacggtttttggtgccgtgtgtccttgaggtatcagcgattgaagcgatcgttcccggctttgacttatattttattccgagtgtattaaacagcaaaaacgcggattggattgtcggaatgcaccagaaagccatgaaggaatacggagaactgatgtctatggaagaaatcgtggcggagggctactgcatcgcaaatccagattgcaaagccgcggcactgactgaagcggacgccgatctgaatatggatgatattgtcgcctatgcgcgtgtgtcggagctgctgcaactgccgattttttatttagaatacagcggcatgcttggagacatagaagctgtcaagaaaacgaaggctgtattggaaacgtcaaccttgttttatgggggcggcatcaaggatgcggaaacggccaagcagtacgcagagcatgcggacgtgatcgttgtaggcaatgctgtgtatgaagattttgacagggctttgaaaacagtagcggctgtgaaaggcgagtagtaaattgtacggatttggtttatgatagaacatatgttttgtataggcgggtgaacaaattttgaattatattagcaatcaattactaagcggtttaaaccccgttcagcaggaagcagtcaaaacaacggacgggcctcttttgctgatggcgggagcgggaagcggaaagacgcgtgtcctgacccatagaattgcttatttaatggcggaaaagcatgtggcgccgtggaacattctggcgatcacatttacaaataaagcggcacgcgaaatgaaagaacgtgtggaaagcatcctcggacccggcgcggacgatatctggatttccacattccacagcatgtgcgtgcggatcttgcgcagagatatcgaccggattgggatcaaccgaaatttctccatccttgatacggctgaccagctttcagtgatcaaggggattttgaaggagcgcaatcttgatccgaagaagtttgacccgagaagcatcctcggtacgatcagcagtgcgaaaaacgaattgaccgaaccggaggaattctctaaagttgctggcggctactacgatcaggtggtcagcgatgtatatgctgattatcagaagaagctattgaaaaaccagtcgctcgatttcgacgatttgattatgacgacgattaaactgtttgaccgagtgccggaagtacttgaattttatcagcgcaaattccaatacatccatgttgatgagtatcaggatacgaacagggcgcaatacatgcttgttaagcagcttgccgagcgtttccagaacctttgcgttgtgggggattctgatcagtcaatctacagatggcgcggcgcggatatcaccaacatcctttcatttgaaaaagattatccgaatgcaagcgtgattttgctagaacaaaactatcgttcaacgaaacggattttgcgcgcggcaaacgaggtcattaaaaacaactctaaccgcaaaccgaaaaatttgtggacggaaaacgatgaaggcatcaaaatttcctattatcgcggtgataatgaattcggagaaggacagtttgtggccggcaaaattcatcagcttcacagctcaggcaagcggaaactgtctgatatcgccatattataccggacaaacgcgcagtcccgtgtgattgaggaaacgcttctcaaagcgggcttgaactataacattgtcggcggcacaaagttctatgacagaaaagaaattaaagacattcttgcgtacctgcgcctcgtatccaatccggatgacgatatcagtttcacgcgcattgtcaatgtgccgaagcgcggagtcggcgcgacatcacttgaaaaaatcgcttcgtatgcggccataaacggcttgtcatttttccaagcgattcagcaggttgattttatcggcgtcagtgccaaagcggcaaacgcgcttgacagctttagacagatgattgaaaacctgaccaatatgcaggattacttatccattacagagctgacagaagaaattcttgataagacggaatacagagaaatgctgaaggctgagaaatcgatcgaagcccaaagccgtttagaaaatatcgacgagttcctgtctgttacgaaaaactttgaacagaaaagtgaagacaagacactcgttgcgttcctgacagacttggcgttgatcgcagatattgatcagctcgatcagcaggaggaagagtcaggcggcaaggatgcgatcaccctgatgacactgcacgccgcgaaaggactggagtttccggttgttttcttgatggggcttgaagaaggcgtcttcccgcatagccgttcactcatggaggaagcggaaatggaagaagaacgccgccttgcgtacgttgggattacaagggcggaacaggagctttatctgaccaatgctaaaatgcgcaccttgtttggccggacaaatatgaacccggaatctcgcttcattgctgaaataccggatgatttattggaaaacctaaatgagaaaaaagaaacgagagcgacgtctgcgagaaaaatgcagccgagacgcggccctgtttcacgcccggtatcctacgccagcaaaacaggcggcgacaccttaaactgggcagtcggagataaggcgggccataaaaaatggggaacaggaactgtcgtcagcgtgaaaggcgaaggagaagggacggagctcgatattgcctttccgagccctgtcggcgtgaaacgcctgttagcagcatttgctcctattgaaaagcagtaattgaagaggaaaggaagaagcagatggacaaagaaacagcgaagcagcgggcagaagaactgcgccgcaccatcaacaagtatagctatgaatattacaccttagatgaaccgagcgtcccagatgccgaatacgacagattgatgcaggagctgattgcgatcgaggaggagcacccagacctcagaacgcctgactctcctacgcagcgcgtcggcggagccgtgcttgaagcgtttcaaaaagtcacccacggcacaccgatgctcagtctgggcaacgcctttaatgctgatgatcttcgtgatttcgaccgccgtgtgcgccaagccgtcggcgacgatgtggcgtataatgtggagctgaaaatagacggtcttgctgtttctctccgttatgaagacggctattttgtcagaggggccacaagaggtgacggaacgactggagaggatattacggagaacctgaagacgatccgcaatatcccccttaaaatgaaccgtgagctgtcaatcgaagtgcgcggagaggcgtatatgccgaaacgttcgtttgaagcactcaatgaggaacggattaaaaatgaggaagaaccgttcgccaatccgcgaaatgccgcggcgggatctctcaggcagctcgatccgaaaattgcagcgaaacgaaacctcgatatcttcgtctacagtatagcggagcttgacgagatgggtgtggagacgcaaagccaagggcttgattttctcgacgaactcggatttaaaacgaatcaggaacgaaaaaaatgcggcagcatagaagaagtcatagtgctgatcgatgagtttcaggcgaagcgcgcagacctgccgtatgaaatagacggcattgtcattaaagtcgattctctcgatcagcaggaggagctcggttttacggcgaaaagcccgcgctgggccatcgcgtataagtttcctgctgaagaggtcgtgacgaagcttctcgatatcgaattaaatgtcggcagaacgggtgtgatcacgccgaccgcgattcttgagccggtaaaagttgccggcacaacggtctcaagagcatcccttcataacgaagatttaattaaagagaaggacattcggattttggataaggttgtcgtcaaaaaagcgggcgatatcatcccggaagttgtgaatgtcctcgttgaacagcgaacaggagaagaaaaggaattcagcatgccgacggaatgtcctgaatgcggcagtgagctcgtccggatcgaaggagaagtggcgcttcgctgcattaaccctgaatgtccggcgcaaatccgggaagggctgatccatttcgtttcccgcaatgccatgaacattgacgggctcggcgaacgagtgatcacacagctgtttgaggaaaaccttgtccgcaatgtggcagatttatataagctgacgaaggaacgagtcatccagctcgagcgcatgggtgaaaagtccactgaaaacctgatcagctccatccaaaaatcaaaagaaaattcgttagagcgtttgctgtttgggcttggtatccgttttatcggatcaaaggctgcaaagacgcttgccatgcattttgaaagcttggagaacctgaaaaaagcctcaaaagaggaacttctcgcggtagatgaaatcggtgaaaaaatggctgacgcggtcatcacctattttcataaagaagaaatgcttgaactcttgaatgaacttcaggagctgggcgtaaacacgctctacaaaggcccgaaaaaagtaaaagcagaggacagcgactcttactttgccggtaaaacaattgttctgacaggaaagctggaagagctgtcaagaaacgaagccaaagcgcaaatcgaagcgctgggcggaaagctgactggaagcgtcagcaaaaacacagacttagtcatcgccggagaagcggcgggaagcaagctgacaaaagcacaagagctgaacattgaagtgtggaatgaagaacagttaatgggagagctaaagaaataagaggagtgttttctattgaaaaagacgttggcattggcggcaacggcggcagtattaatgctgtctgcctgctcgtcaggttttgggggggagaaggaggaagagattacgcaaaagacggcgaaatcgtcagaaaaagcgattgtcccgaaatataatatctctgactcctattacaaaatggtgctgccgtttaaggcaggcaaagcgcgcggcttaacaacggaacagctgaacactaggctggacattgacgagtttgaaacagggctgatgcgtcttgcccaagattctttctcgactgacgattatctgttccaagaaggacaatatttagatgaggatacagtattaagctggctggcacggaaaaaaacgggctctgatttgaaaaaagccgaaaaagaagataaaaacttcaaaaatgaaggcttgaacccggcgctcccgagttctggttcaacagaagaaaagaacgaaagcagcccgatttatttagcatccatgcttgagcacgattatttagtcagaaaagacaagaattctatccagcttggcggcgtcatgatcggactggcgttaaactcagtgtattactatcgtgaaaaaactggcgacccgcaaaaagaagtggagattaaagacagcacgcttcgccagcagggagaaaaaattgcacaggaggttattaaccgcctccgcaaaaaagataacttgaagaatgtgccgattaccgtcgcgctctacaagcaggcgtcaaaaacatcgattgtgccggggaacttcatcgccaaaacagaggtcaaagcaggctctactgatatctcaaattgggatgacatcaatgaaaaatatgtattctatccggcagatacaaccacagcagaaaaatacccggatgacaccgaggtctttaagcggttcaaaaactcaattgaagaatatttcccgaactatacaggcgttgtcggtacagcgctgtatgaaaatgatgaaatgaagaaaatgaagattgacataccaatgcaattctacggaaaaagtgaagttgtcgcgtttacccagttcttaacgggtgaagtgatggactactactctaagagctcagttgatgtcgaagtcaatatcacgtcctcagacggacaggaagcggtcattatccgcaatgccggagataaagagccgactgttcacatttatgactgatagaaaacccttgtgccatattggcacaaggggttttatgttacaattaacaggaaaagggaaaatatttccgcttctgccgaaacacaaatcaaggggaggtatgttgatgctggaaatcgtgtgaaaacaatcattatcaaatctatagcaatgaaaggatgttagacatgcataaagatatcaaaaaaatatttgaggaagagcaggttttggcagaagctgcagcgagatacggtttctcaaaagatcaggtgcgttttctggctgatgcggaaaactatgtatatgaatgtatgaaagacaatcaaccttatattttaaagattacccatacgattcggagatcttctgattatataatgggagagatggaatggctccgtcaccttgcaataggaggaatttcagtagccaaaccgctcccgtcgctgaacggaaaagatgtagaagcagtgccggacggaaacggcgggtcatttttattgagagtgtatgagaaagcgccggggcaaaaagtggatgaatcggactggaatgaaacgctattttatgagcttggcagatacacaggcagcatgcacagcttgacaaaaagctacaaattgagcaatcccgctttcaaaagacaggaatgggatgaagaggagcaattaaagctgagaaaatatgtacctgaagatcagataaaggtgtttcagcaagccgattatttgatgaatgaactgcggaggctcccgaaaagccaggacagctacggcttggtgcatgcggatctgcaccatggcaattttaactgggatcatggcaaaatcacggcatttgattttgatgatatcggctacaactggtttgttaacgatattagcattcttctctacaatgtcctgtggtatcctgttgtgccatatgatgataaagctgcgtttacagaagaatttatgacgcattttatgaaagggtactgggaggaaaatgagcttgaccctacatggctgatgataatacctgatttcctccgccttcgccatatgctgatttacggattgctgcatcagatgtttgaccttaacacaataggagaagaggaaaaagaaatgctggccggtttcagaagagatatagagaatggcacgccgattacagcatttgatttttcagcactggtgtagatagaaaaagccaatgggattccagtcccattggcttttataatgtatcacacttcacgccgactacgccttcaatggctttaatgtcatagtagacatcggtcgtgtatctgtttttatggacgcggaccttcacttccataattggaaaatccttttcgcctaggtcgtcgatccgaacggagtgtgctttgatatctcttcttttcatttcttttaaaatctctgtcattttgtctttatcagaaagtgacattctgatgcggatgtctttttcctgcaggcggtcggggccgatttttctgaccacccatgggagaaattccacgctgatcaggatgaacagaagactggcaaacgcttctttataaaaaccggctcccgtagccagcccgagccccgctgccccccagatcatggccgatgtcgtcaggccggaaatgacatcattgctttttcgcaggatgacaccggctccgataaacccgacgccggagatgatttgtgccggcagacgaagcggatccatcatgatgcggtagtatttagggaaatgatatgccgcattaatactgacgatcgtcagcatgcatgagctgactgcgatgacgatacaggtttttaatccgagcggcttattttttaattcgcgttcaagcccgatgaccatgccaatcaatgtggcaatgcccaatttcaataaaatatcaggatcaatataccagctcaacagcaacttcccccttctctaaggtgtttttaaataaatatgattttctcacagtatttatagcaaaacaagggtacaaaagccaccaagctgcgcttgatggcttattgcttactttttgcgttttaacagcttttccatgacaccgaataatcggtaagaggcttttgcaggacgttttgtgatcatgctgacaatgatgccggcaatcatactgagaataaacccagggatgatttcgtacacaccggttgattttgccaggccggttgtaatccagatcaacacggtcgcagccccgacaatcatggcagcaagcgcgccccattcgttcattcgcttccaatacagactgagcagaatcgcaggtccgaaagctgaaccgaagccggcccaagcgtatccgaccaaatcaagaatggtgctgttcgggttcaatgacaagagtaccgcgataacggcaatgactaagacggacaatcgcccgatcatgaccaattctttatcagaagcttttcgtctgaaaaatgaccggtataaatcctctgttacagcacttgctgtgactaagagctgtgaggaaatcgaactcatgatggcagccaaaatagctgacaataagaaccctgtaattaatgggtggaacaagattttagagaagataatgaaaatcatctccggatcttttacagcaactccgaatttatgggcgtatgcaacaccgattaaacccgtcagcacggaacctagaactgtaatgatcatccagctcataccgattcggcgtgcaggttttaaatctttaatgtctttaatggccataaatcggacgatgatatgaggctggccgtagtagcccaacccccaggctaaataggaaataatgctaatgacgctcgcgcctttaaaaatatccaataagtgtgggttaacagcgtcgatttcatggaaagtcggagcaacgccgcccacatgggtaaaagcaacgatcggcacaagcactagtgctgcaaacatgatcgcaccctgcacgaagtcagtcagactgacagcaaggaaaccgccaaacagtgtgtataatacgacaactgcggtggtcagaaacaagcctaatttgtaatccgcaccaaaagcagattcaaacagccgtccgccagataccataccggaagaggtatacaatgtgaaaaagatcatgatgatcaatgcagatacgattttcagcagtgatgaagaatgctggaatcgtttatcaaagaaatcaggaatcgtaatcgcatcatccgccgcttctgtataagcacgcagccttggagccagcagcaagtaatttgagtacgccccgattgtaagacctaaagcaagccataaggtggacagccctgtcgcaaacatcgcgccgggaacacccatcagcatccatccgctcatatcggccgcgccggcagacaaagcagtaacgaatggtccgaggcctcttcctccaagcatgtaatcattgatgtcagtggttttcttgaatgcataccagccgattaacagcatggcaataaagtaaattcctaaagatataataatttcaatactcacgttttaccctctcttcatttctaataatgttgcatcacctctcaaattgatggtgccagttaagcagcctggcgtaagtgcaaaacaaaagaaattcctttgcgggtgcacttggtaacttaacctaacaaagtattcccggccattcaagcgatgaaaccttgatcatgagcggggaaaaccgttgcaaacctagaagggaataaagaataaaacgctttcaagaaataattaaagtaaaaatattcagaaaaatatttcgtttctccttctcctcattttagtataaaatatatagggtattgtttcgaaaacacaggcctgtctcaaggcgttttgttgctttaaagggcttgtttttgatatgatcagtattatatgacttaacggagaaatatgtggaggtggatcatatgtcacgaatttcaatagaagaagtaaagcacgttgcgcaccttgcaagacttgcaattactgaagaagaagcaaaaatgttcactgaacagctcgacagtatcatttcatttgccgaggagcttaatgaggttaacacagacaatgtggagcctacaactcacgtgctgaaaatgaaaaatgtcatgagagaagatgaagcgggtaaaggtcttccggttgaggatgtcatgaaaaatgcgcctgaccataaagacggctatattcgtgtgccatcaattctggactaaaggagggacacaagaatgtcattatttgatcataaaatcacagaattaaaacagctcatacataaaaaagagattaagatttctgatctggttgacgaatcttataaacgcatccaagcggttgatgataaggtacaagcctttttggcattagatgaagaaagagcgcgcgcatacgcgaaggagcttgatgaggcggttgacgggcgttctgagcacggtcttcttttcggtatgccgatcggcgtaaaagataatatcgtaacaaaagggctgcgcacaacatgctccagcaaaattctcgaaaactttgatccgatctatgacgctactgtcgttcagcgccttcaagacgctgaagcggtcacaatcggaaaactgaacatggacgaattcgccatgggatcatctaccgaaaactcagcttacaagctgacgaaaaacccttggaacttagaaacagttcccggcggttcaagcggcggatctgcggctgcggttgctgcgggagaagttccgttttctcttggatctgacacaggcggctccatccgtcagccggcatctttctgcggcgttgtcggattaaaacctacatacggacgtgtatctcgttacggtctggtcgcatttgcgtcttcattagaccaaatcgggccgattacacgtacggttgaggataacgcgtttttacttcaagcgatttccggcgtagacaaaatggactccacgagtgcaaatgtggacgtgcctgattttctttcttcattaactggcgacatcaaaggactgaaaatcgccgttccgaaagaataccttggtgaaggtgtcggcaaagaagcgagagaatctgtcctggcagcgctgaaagtccttgaaggtctcggcgctacatgggaagaagtgtctcttccgcacagtaaatacgcgcttgcgacatattacctgctgtcatcttctgaagcgtcagcgaaccttgcacgctttgacggcatccgttacggctaccgcacagacaacgcggataacctgatcgacctttacaagcaaacgcgcgctgaaggtttcggaaatgaagtcaaacgccgcatcatgctcggaacgtttgctttaagctcaggctactacgatgcgtactacaaaaaagcgcaaaaagtgcgtacgttgattaagaaggatttcgaggacgtatttgaaaaatatgatgttattgttggaccgactacaccgacacctgcgtttaaaatcggtgaaaacacgaaggatccgctcacaatgtacgcaaacgatatcttaacgattccggtcaaccttgccggcgtaccgggaatcagcgtgccatgcggattagcagacggacttccgctcggcctgcaaatcatcggaaaacactttgatgaaagcactgtataccgcgttgctcatgcatttgaacaagcgacagaccatcataaagcaaaacctgaactgtaaggggtgaaaagaattgaactttgaaacggtaatcggacttgaagtccacgttgagttaaaaacaaaatcaaaaattttctcaagctctccaacgccattcggcgcggaggcgaatacgcagacaagcgttattgacctcggatatccgggcgtcctgcctgttctgaacaaagaagccgttgaattcgcaatgaaagccgctatggcgctcaactgtgagatcgcaacggatacgaagtttgaccgcaaaaactatttctatcctgacaacccgaaagcgtatcagatttctcaatttgataagccaatcggcgaaaacggctggatcgaaattgaagtcggcggaaaaacaaaacgcatcggcatcacgcgccttcaccttgaagaagatgccggaaaactgacacacacaggcgacggctattctcttgttgacttcaaccgccaaggaacgccgcttgttgagatcgtatcagagccggatatccgcacgccggaagaagcgtacgcgtatcttgaaaagctgaaatccatcatccagtatacaggcgtttctgactgtaaaatggaagaaggctcacttcgctgtgacgccaatatctctcttcgtccgatcggccaagaggaattcggcacaaaaacagaattaaaaaacttgaactcctttgcgtttgttcaaaaaggccttgagcatgaagaaaaacgccaggagcaggttcttctttccggcggcgtcatccagcaagaaactcgccgttatgatgaagcaacgaagaaaaccattcttatgcgtgtcaaagagggatctgacgactaccgttacttcccagagccggatctagtcgagctctacattgatgatgaatggaaggaacgcgtaaaagcaagcattcctgagcttccggatgagcgccgcaagcgttatatcgaagagcttggcttgcctgcatatgacgcgatggttctgacgctgacaaaagaaatggctgatttcttcgaagaaaccgttcaaaaaggcgctgaagccaaacaagcgtctaactggctgatgggtgaagtgtcagcttacctaaacgctgagcaaaaagagcttgccgatgttgccctgacacctgaaggccttgccggcatgatcaaattgattgaaaaaggaaccatttcttctaagatcgcgaagaaagtgtttaaagaattgattgaaaaaggcggcgacgctgagaagattgtgaaagagaaaggccttgttcagatttctgacgaaggcgtgcttctgaagcttgtcactgaggcgcttgacaacaatcctcaatcaatcgaagactttaaaaacggaaaagaccgcgcgatcggcttcctagtcggacagattatgaaagcgtccaaaggacaagccaacccgccgatggtcaacaaaattctgcttgaagaaattaaaaaacgctaataaaaaagcagcccttagaggctgctttttttatggtcaaattgagataaagacagagatgagggcccgaagcctttcaacttctttgtcgttggttccggtcaaattggacagcatgcctttaataatcggcttgcgcggtttatcctgagtcaattcttcctcgataacatcaagtgacacggtgatatcctcgggcagcgtgctgttttctttcactttctgaatgtcctcaagcagctggtcttttcccgcaggcatcgggttgaaaatgtcttttgatacaatcggattgagtgcagaacggctcagcccctgtacaagatcattcagtctctcaataataaaggctgagatttcttctgcatcgatattaagctcaccgttaaataccatcacgttcatataggaatgcacaatgcctcttgccatgatggacagatctgcgacataccgctcgattccttcgccataggataccagcaaggcgttccggtacagcttatccgtctccatggttactttgtaaaagtattgcttgatttcttgattttccggaatgatattttcggtaagcaaaagaacgataaaatctttatgatcgcgaaaatcctcaaattgagcgccaatttgcttttttaacacttccttagggggctttccggcgagatcttcttctatatttttcattttgttcatagacataccgatataatattcacaggcagataacagcagcgcttctttcgatttgaagtgcaaataaaaagcgcccttcgaaatgccgcattcactggcgatttcttggatcgtcgtagctgcgaatccttttttcgcaaataaacgaatgctggtttttatgattctctcttttttttcattcatgacgtgcttccccttaatccttgaaaaatttagtaaaattttctggtatatgagttgacgttgttgcgttataacgtttagtattatatagaatgaccagtcagtcaataaaaaatgtaatggaggatatgatgaaccacgttattaatttcgttctgaaaaacaaattcgccgtatggctgatgacgattattgtaacggcagccggcttgtatgcgggtatgaatatgaagcaagagtctattcctgacgtgaacatgccttacttgacgatcagcacgacatatccgggtgcaacaccaagccaagtggctgatgaagtgaccaaaccggttgaacaagccgtacagaacttggacggtgtcagcgttgtgacgtcgacgtcctatgaaaacgcatcgtcggtcatgattgaatatgattatgagaaagatatggacaaagcgaaaacagaagcagctgaagcgttagaaaacgtcaacctgcctgatgacgcgaaggatccggagatttcacgctacagcttgaactcattcccgattctgacgctgagcgtgtccagtgataaagataatctacaagagctgacgaaacaagtggaggacagcctcgtttctaaacttgaaggcatagaaggcgttgcgtccgtccaagtatcaggccagcaggtggaagaggttgaattctctttcaaagaagacaaactgaaggaatacggccttgatgaagatacagtcaagcaagtgattcaaggttcagatgtgacaactccgcttggattgtacacattcggaaatgaagaaaaatctgtcgtcgtcagcggcgatattgaaacaattaaagatttgaagaatatgagaatcccgacggtatctgcttcaagtgcaggcagcagcgcagcatctcaagcgggtgcgcagagtgctcaagcagcccaaagcgcacaagcggcagcacaggcgcagcaaagcgcaagcacagcagtgccgacagtcaagctttctgacattgctacaattaaagatgtgaaaaaagctgaatctgtttcacgcacaaatggcaaagacagcatcggcatcaatatcgtcaaagcaaacgatgcgaatacggtagaggttgccgacaatgtcaaagctgagctgaagaagttcaaagaagaccataaaggcttcaattacagcgcaactctcgacatggcggagccgatcacacagtcagttgacacgatgttaagcaaagccatcttcggtgctatttttgcgattgtgattattctcttattcttaagagatatcaaatcaacattaatttctgttgtttcaattccattatcattgctgatcgcactccttgtgctgcagcagcttgatatcacattgaatattatgacgctcggcgcaatgaccgttgccatcggacgtgtagtcgatgactccatcgttgtgatcgagaacatttaccgccgcatgagactcaaagatgagccgctccgcggaaaagccttggttcgtgaagcgacgaaggaaatgtttaaaccgatcatgtcatcgacgattgtgacaattgcggtattcctgccgctcgcacttgtaggcggacaaatcggtgagttgtttattccgtttgccttaacgattgtttttgcgcttgccgcatccctggtgatttcgatcacgcttgtgccgatgctcgcacacagcctgttcaaaaaatcattaaccggtgcgccgattaaagcgaaagaacacaaaccaggcagacttgcaaacatctataaaaaagtattgaactgggcgcttagccacaaatggatcacgtctatcatcgctgttctgatgctccttggaagcttgttcctcgtaccgttaatcggtgccagctacctgccgtctgaggaagaaaaaacgatgcagctcacatacagcccagaaccgggtgaaacgaaaaaagaagccgaaaatgaagctgaaaaagcggaaaaaatcctgcttgaccgcaagcatgtcgatacggttcagtattcattaggctctggcagcccgcttgccggaggagattctaacggtgcgttattctatatcaaatatgaaagcgacacacctgactttgataaagaaaaagataacgttctgaaggaaatccaaaagcaatctgaccgcggagaatggaagtcacaggacttcagctcttcaggcaataacaacgaattaacatactatgtgtatggcgattctgaaaacgatattaaagacacggtcaaagatattgaaaaaatcatgaaggatgaaaaggatctgaaaaacgtaaattcaggcctttccagcacatatgatgagtacacatttgtcgctgaccaagaaaaactaagcaaactcggtttaaccgcgtctcaaatttctcaggccttaatgtcacaaacatcgcaagaaccgcttaccaccgtgaaaaaagacggcaaagagcttgatgtgaacattaagacagaaaaagacgagtataagagtgtgaaagatttagagaataaaaagatcacttccgcgactggccaggaagtcaaaatcggcgatgtggcaaaagtgaaggaaggatcaacatcagataccgtgtcaaaacgtgatggaaaagtctatgcggatgtcacaggtgaggttacatctgacaacgtcacagccgtatcaactgctatccagaagaaaatcgataagcttgaccatcctgataacgtatcgattgacacaggcggcgtatcagcggatatcgctgattccttcacgaagctcggtttagcgatgctggcagcaatagcgatcgtttaccttgtgctcgtgattaccttcggcggagcactagcgccatttgcgattctgttctcattgccgttcacagtcatcggtgccctggtcggactttacgtatcaggtgaaacgatcagtctgaacgccatgatcggtatgctcatgctgatcggtatcgttgtcacgaatgccattgtcttaattgaccgcgtgattcataaggaagcggaaggcctgtctacgagagaagcgctcctggaagccggctctacacgactccgtccgatcctgatgacagccattgcgacaatcggcgccttgattccattagccctcggcttcgaaggcggaagccaggtcatttcaaaaggactcggcgtcacggttatcggcggtttaatcagttcaacgcttctgacgctcttgatcgtgccaatcgtatatgaagtattggcgaagttccgcaagaaaaaaccgggaacggaagaagagtaaaaaaacaaaaagcctcagctatgctggggctttcagcttgttgaaaaaccctcgcattcgttgtcaggtctgcgcgtcggtgctcacgaattctacattcactccgctccaatgctcccccttcctagactacaagggttttcaatcaagctgaaagaatgttaaggatgacaaaagctcaaaacaagaatcagttttgagcttttgtgcgttttcacctgtaagattatgtacattttgttgcgatttttttaactcatagtataattaaaggttgttagtgtaaaaatggatcggatactcttaagtaggatgatgagataatgaaacgtgcacgcataatatacaatccgacttcaggacgggagatctttaaaaagcatcttgcccaggtcctgcaaaaatttgaacaagccggctatgaaacctccacccatgcgacgacatgcgcaggagacgctacacacgctgccaaggaagcggcattgcgtgagtttgacctgatcattgcggcaggcggagacggaacgatcaacgaggtcgtcaacgggcttgcgcctttagacaaccgtccgacactcggtgtgattcctgtcggcacaacgaacgacttcgccagagcgctcggcattccgcgcgaggatattttaaaagcagcagatacggtcattaacggcgttgcccgcccgattgacatcggacaggtcaacggccagtattttatcaatatcgccggaggaggccgcctgacggagctgacgtacgacgtgccaagcaaactcaaaacaatgctcggccagcttgcttattatttaaaaggaatggaaatgctgccttcacttcgtccgacagaagtcgagattgaatatgacggcaagctgtttcaaggtgaaatcatgctgtttttggtcacgctgacaaactccgtcggcgggttcgaaaagctcgcgccggattccagcctgaatgacggcatgtttgatttgatgatactaaagaaagcaaaccttgctgaatttatcagggtcgccacgatggcgcttcgcggcgaacacatcaacgaccagcacattatttatacaaaagcgaaccgcgtgaaagtcaatgtatcagaaaagatgcagctgaacctggacggcgagtacggcggcatgctgccgggcgaattcgtgaatctgtaccggcacattcacgtcgtcatgccgaaggagaaagcggaacagctggatgactaaaacttggctttgtaagccaagctcagaatgttgacaaaatcctaaaacagttttcgttttaggattttgtcatcttttcagcgtgattgaaaacctttgaagtctaggaagggcgagcatcggagcacagcgaatgttgaattcgtgagcaccgaagcacaggactgacaacgaatgcgaaggtttgcctacacgctgaaacttggcttgaataggccaagtttttctttcgcttaaaacaagaggtgaacatacatgaaaatgaaacccccagtagaaaaaaacgaatactatgacgtgacatttgaggatttgacccacgaaggagcgggtgtcgcaaaggtccaaggattcccgatctttgtgccgaacgccctgccggaggaaaaagcccaaatcaaagtcacacgtgtcaaaaaagggttcgccttcggccgtctgattgagctgaaggaagaaagcccgcatagaacggatgccccatgcccgatttacaagcaatgcggaggctgtcagcttcagcacatgacctacgaaggccagctcttgtttaaacagaaacaagtcaaagacgtcttagaacgcatcggcaagctggacctttcaaacgtcaccgtgcacccgacactcggcatggaagacccgtggaactacagaaacaaagcacaggtgccggtaggagaacgggaaggcggactcgtcgcgggattctatcagcaaagaagccatgacatcatcgacatgagcgcctgcctgatccagcaatccaaaaacgacgaagccgttcaagctgtcaaagacatttgcgcaaactacggtgtcaaagcctacaacgaagaacgccacaaaggctggctccgccacatcatggtcagatacggcgttgttacgggcgaaatgatgatcgtcttcatcacaagaacaagcgacttcccgcacaaagcgaagatcatcgaagacatcacagcgcaattcccgcacgtcaaatccatcgtgcaaaacatcaacccaaacaaaacaaacgtcatttttggcaacgaaacaaacgtcatctggggcgaagaatacatctacgacctcattggagacgtcaaattcgccatctccgccagatcgttctatcaggtcaatccggagcaaaccaaagtgctctacgacaaagcgcttgagtacgctgagcttcaaggggaagaaaccgtcatcgacgcctactgcggcatcggaacgatttctttatttctggcaaagcaagcgaaaaaagtgtacggcgtagaaattgtaccggaagcaattgaggatgccaaacgaaacgccgagctcaacggcatcacaaacgctgagttcgcggtcggggaagcggaaactgtgattccaaaatggtatgaagaaggcattacagctgatacgctagtcgtcgacccaccaagaaaaggctgcgacgaagccctcctgcggacgattgtggagatgaaaccgaagcgggtggtgtatgtgtcctgtaatcctggcacgcttgcgagagacctgcgggtggttgaggatggcgggtatcagacgctcgaagtgcagcctgtggatatgtttccgcatacgaatcatgtggagtgttgcgtgttgcttgaaaaaaacatgtgtgagttcgagaaattatagtatatctcggacttccgtcttctttaattcttcgatacactcaattggtttgtgaagaattttttcatcaatagttgggtttgagtgaattgttcaagttgttttagtaaatcatttaaattatctttaagtcggattaaggtctctaatcggagtctctacgcgattttgttttcagataggtatttgtttcaattggataggcttaacaaacaaatttgaaaaaagatcaataagcaacaagtcgaattaccagtcttacagatgtttaatacaatcgaaattgtcccctttgattatcaagggaagttagaggataacatagcagatgctattatgaccattaaaggagcaaataaatcttactttgatgtttgttgattttctttaacgctcattgttctaaagcaaatcttgacaaacggcaaattgtttttggtgttggtcaagatttggattgtctattgtttagaagacaccaataaaaactgcttttaaaaataattaagattgacaaatgaacgacgtagacagctttatgagcaaataaaccaattgtaaaggaaaaaaatcaaatataatcatattgttttcaatgaaaatgaaattacatttactattcccgatatcatagatgtaatcaataggatacaggctgtcataactcaattaaagcaagtgttaataaccgttgatccattggtaagtgaatatgccgaaacttgtgtaaggaagctctctaattagggggctttttgctttaaaaagaatagacatgtatcaattgacaaggaaaaggaaaaagttatatactgtatttaacaaatgttaaatcttctatttaacatagaaataggaggtgtaaaatgcaactcggcgatattgctaatgtaaagacagggcttgtgttaagtaggaaaaaggcagaagttgaatatgatgcgaaagctacatacaagctactttcactcaaaaatattgcggaagatggcatgattgaaaacgattcgtttgaggagtttgtaagtaatgacgatttagacgatcactactttacaaaagaaggtgatgtgctaatgcggttgagccacccacacacagcggttttcattgaaaaacaatatgaagggttgttaattccatcgtatttcgccatcattaaagtagacaaaacaaggttcctacgagagtacattgcatggtatctaaactcatttgaagtaaaaaaagagttggaacgctctcagtcaggtagtcgtatccccagtaccaatcaaaatgtaattaaaacactccctgttgtctggacaactctatcaaagcaaaaagcattaatcgaactttacaagctccatcaaaaagaaaaaatgctttataagagattaattgaggaaaaagacttattattccaagcgatttcacaacaaattttaaaggattcaaaatcggagggaaatattaatgattgaactaacaacacaagacaaaattaacagtgttttatggcaggccgcagatacttttagagggaaaattgattcctcaacatataaagattatattctaacaatgctatttataaagtatttaagtgatacatacaaggagcatttggaagaatatacgaagaaatataatggtgatgaacgacgcattgaacgtgctttatcaagagaacgttttgtacttgatgaacaatctacttttgattatttgtatagcaaaagaaatgatcctaaaattggagaaatcattaacaaagcattggaacgcattgaaaatgaaaacacaggtaaacttcgtggtgtatttcgtaacattgactttaacagtgaatcaatccttgggcaagcgaaagagcgaaatgcaatgttacgatcacttttggaggattttagacatttatctctaagaccatcacagttaggaaatgaagatatagtagggaatgcataccagtacatgattggactttttgcatcggatgcaggtaaaaagggtggcgagttctatacacccgctgaagtatcagaattactggcacgtttagttaaaccgcaagaaaacgaccgtatttatgatccaacatgcggatcaggttcgttgttaataaaagtggctaaacaggttccaagtagaaaagttgctatatacggtcaggaacgtaatggtgcaactcattcattagctcttatgaacatgtacctacatggggttgacgatgctaagattgagtggggcgatacattagcaaatcccttacatttagaggatggaaagttgatgaagttccaagcaatcgttgctaatcctccattttcattagataagtgggctatgggcttcgcaggagaaggaacaaatgacaaaaaatttaaaatggagtcaagttttgatccctatagacgttttgagtggggagtacctccaagttcaaaaggagactatgcatttgttcaacatatgctttattcattagctgaaaatggacgtatggctactattcttccacatggcgtactgttccgaggggcaagtgaagggaaaatacgtcaacaaattattgagatgaacttattggatgcggttattggtttaccagaaggattattttttggaacaagtattcctgcgtgtatcatggtatttaaaaaagaccgaaaacgaaatgatgttctttttattgatgcatctactgaagaacattttgaaaaaggaaaaaatcaaaattaccttcgagaaaaggatattgagagaattgttaggacatatgagaatcgggaaacaattgaaagatactcttatttggcaacaatagatgaaataaaagaaagtgaatttaatctaaatattccaagatatgtggacacttacgaagaagaggaacctgtcgatatgattacagtgaaaaataatatttcgaatataaagaaggaactacaagaagtagagttacaaatggagaagtatttgaaagagcttggattgtaggtgaatatacttgactaaaaataattatgttagaacggcgattggagaattaccttcagattgggaagtagaacttcttgataatatagcagaaagaaaatctggtcatacaccagataagaagatagaagagtattggaacggaaatattccctggatttcattgaaagacttatcacgattaaataaagggtttgtatatgaaacaacggattttacaacaaatgaagggattaagaactcttctgctgttttgttacctcaggggacaatagtcatttcaagggatgctacagttggaaaggttggaattcttgctgaggagatggctacgagtcaacattttatcaattatatttgtggggatagactgaataacgtttatctatactaccatttactatttagaaaccacattttcgaaaggattgctacaggaagcacaattaaaacaattggtttaagtttctttaaaaaactaaaggtagcactacctccaattagggaacaagaaagaattgcttctatcctttctgcttgggacaatacaattgatttaaaagaaaaactaattgattataaaaatgagcagaaacaaggattaatgcaaagattattgacaggagaagtaagattgccagggtttaagggggaatggaaaaaggaaaggattggtaaactcataactgaaagtaaagaaatagcaagtaaaccagatcttaataaaagaataaccgttagacttaatttaaaaggtattcagaaaagagatgtttcatctacagaaaaggaagatgctacaactcaataccttagaaagtcaggacaatttatttacggaaagcaaaatcttcataagggagcttttggcataattcctaaagcgttagaaggttatcaatcttcttcagatattcctgcattcaattttaatgaggaagttgatccttattggtttttttactatttttcaagggagagcttttatacaaacttggagaaaatatcaactggtacaggatcgaaaagaattaacccaaaagatttgtttaaggttaaaatccattttccaccttatacagaacaacaaaaactttcagaagtctttttatgttttgatagagagattagtctacttaaagaagaggtcgaagcattaaaagaacagaaaaaaggtcttatgcaattacttttaacggggaaagtcagagtaagggtataaatcatttactttatttcttcgtttttattaggaggtgtagagatggcaagggagaagagttatgatgaacgttacataagccaagttcctgcaattgaggttcttcgaaggttaggttatcaatatcttgaaccagaagaagccgagcagatgcgtgggaatttgtacaacgtattacttagaaatgttttgcaagaaaagttacggtcatttaattcttatgaatacaaaggggaaatatataagtttagtgactccaatatccaacaagctattcgagatttagatgaaccattaacaaatggtcttgtaaagacaaatgaagcgatttatgaaacgttaatgaaaggaagaacatattctgagtttttacctgatggctcaaaaaagtcatttacaattcaatttattgattggaagaacattgaaaataatgtgtttcatatagtggaagagtttaatgtggaacggatggatggacgtggaaacgttcggcctgatattttactgtttgtaaatggtattccttttgttgtaattgaatgtaagaaagcatccatctcgatggaacaagggataagtcaaatgattcgaaatcagggtaaggattatgttcctcaactgtttaagtttgtacaaatggttatgtctactaacaaaaatgaaactaagtatgcaacatgtaatacaccaaaaaagttttggtctgtatggaaggaagaaaaagaagtatggttagagtcttggttggacaaagctgtagaaagtagattgccaacaacacaggataagaatattatttctctgtttcatcctaagcgtttattagagatcactcaatttttcactctgttcgataaagacgtcaaaaaagtagctcgttatcaacaatattttgctataaaagaaatcattaaaacaattcaagaaagagatgaacatgggaatcgtcaaagtggtgtgatttggcatacacaaggatcaggaaaatcactaacgatggtgatgttagccaaatacattctttctgagttgtttgaatataatccgaaagttgttgttgttacagatcgggttgaattggataaacagattcataagacgttccgtcatacaagattaaaggcaagtagagcaacatcgggcggccatttaattgatctaatcaatgacaacaatgctgatattgtcacaacgttggttcataagttcgatacagcatcttcaaaacaaaaaccaattgagtcaaaggacatttttgttttagtagatgaatctcaccgaacacaatacggagagcttaatataaaaatgaaaaaggttttccctaatgcatgctacttaggttttacaggcacgccgttaatgaaaaaagaaaaaaatacgatgattaaatttggaaagctaattcacacatatacaattgcagatggtgtacgggataaggctattgtcccgttattatatgaaggaaaaatggttgatcaatcggttaatcaaaaggctattgataacagattagagatgattactcgtaatctaaatgacaagcaaaaggaagaagtaatgaaaaagtggagccaatttgaacgaattgcttcctccaaccaaagaataagtatggttgcatttgacataaatgaacatttttttaagaattacaaaacacaaggaagcaactttaaagcgatgttagctacaaatagcaagattgaggctattcgttactttgaatcatttgaagaacttggcgatttgaattgtgctgtagttatttctccacctgaccaacgtgagggacatgaagtggtcgatgtggaatcaaaggacaaagtacagcatttttggaaaagaatgatggatcgttatggaacacctgaagactatgaggatgccataaaagatgaatttattaatggtgatgaaattgacttactcattgtcgttgataaattgctcacaggttttgatgctccgagagctacagtgttgtatgttgataagccaatgaaagaacacactcttctacaagcgatagcgagggtaaaccgtctatatgaaggaaaggattatggctttatagtagattatagagggttattagataaacttgatcaagcaatgcaaatgtactcaggagcagggttagaaaactttgatcctaaggatttagagggagctatacatgatgtcattagtgtaattggttcgttaagacaatttcattctgatttattacaaatatttgctcctattaagaataaacaagatgttgaagagtatgaagtatggttagaagatgaagaacttcgagagagattttatgatgtattaagcaactttgggcggaatcttggtattgcattagaatctgaaaaaattcacaatgctctacggccagaggaacttcaaaagtataagaaagacttgaagtttttccaagagctaagaaaaagtgtgaagctccgctattccgacacaattgatcataaggaatacgaggcaaaaatgcaaaagctaatggataattacatttctgccgaagagattatccgtattacaaatcctgtagatattttaaatgaaaaagcattcgaggaagaattagaacgcctggattcaaaacgtgctaaagctgatgccattcgtactcgtttaacgaaaagtgtaagtgcaaaatgggatgaaaaccctgcattttataaaaagttctctgaacgtattcaagaagctattaaagaatacaaggataaacgaatctccgaagcagagtatctgaatcgaataaaggatataatgaaagattatcgcaaaggtgaatcaaatgacgattatccagaagtgattaaggaaaatcgaaaagcacaagcgttttatggagttgcaaaagaccttatgagcgaagttgcggagatttctgaaagttatggttcggatacactcggagatttagctttaaaaacggataaagtgattaaagaacaccaaaaggttgactggcataataatcttgaaattcacaatcgaattgcacaggacttagatgatcttctctttgattttgcagaagaaaatgggatagaaatagattatgatacaattgataaacttatagagcaaattaaaaccgttgctcttagacgttattaaggttgtgaacagcatggagagacatcaaatccagtacgtaaataaaataattgactttgctattcaacgaaagaatgttaagaatgttaatcttaacattaagcctgatatgacaatagaggtgtctgcacatgatgccgttccgttgaatttcatttatgattttgtgaaaagcaaaggtgcatggattgttaagaatgtaaaaaactttgaaaatgcacaaccaaatagccaaagtgggcgagagtatgtaagtggtgaatcctttaagtaccttggaaaacaatatcgtctacgagtgcaaaatactgaggaagaggaaatagtaaaatacttccgaggatttatctatttattcgttaaagatcccaatgattacgaccgcaaagctaaacttatggatgaatggtatcgtgagaaagcatttatgacatttcaggaatctcttaataagcaacttccattagtacaaaagtacggagttgataaacctaatcttgatttacgtacaatgaaagctcgttggggttccgctttaaccgacaagaatacgattttattaaatacagagctgataaaagcgccaaaattttgtatagattatgtaactttacatgagttaatccattttaagtacaatgaccatagtgaaagattttatgatatgctgtactcattaatgcccgattgggaaaagagaaaagcaattttagatgaagagattgtaaaagacttataagaaaaagaacctctttggcaacttaacaaccagattaatcaacaaaaggcagttcctaattttcatgtggagactgcctttttaatttcttattcggattttattggagaattggtctacaaaattgaggattaattgagaggtgaggtcttggacgaaaatatgtgggaattgtcgttcgcaagtggcaacaaactgcttcacacttcatctgaaatacggtgattcttcataacaggattagatgaacgaggattcgcttgtccaatgtgagtcatcattatctttcattctttcaactaaagacgcgataatagagaaatttttcctaataaaggctatctcgtcactttctgataaaggattttcaataatgaggttatcatcttttacaaatttgcaatctttgctaaccgcttgatgtacacgtaatggttttgcaacacgctgtaggtcgttctcttcttttgggagaagatcatttacaatttggacatgctgtttgctacttatggcagtgaactgtctttgttcatgggtataactctttaaaaaataatgtttattatagtttgataacatgaaattattctcattcggaggaggttttttattggataatacgtataatccttttgataagatgcagtttacatataacaattgtttcctttgtgggagtaaagatgtttcgcaaaaaactttagagcatgtattcccaaagtggttgttaaaaaggtttgagttatggaataagcaaatacaattattaaatggtacattaatttcatataggcaattgaccattccttgttgtaacaaatgtaacaacgaatatttatcacgtattgaaaacaaatttaggagggctgttgacaatggatatgatgcatttttaaatctagatgaagaaaccatctttttgtggtctgcaaaaattttatatggccttttatataagcaattatctttaccatttgataggaagtcaccgcgattgggaaccattacaagtcctgatctattagagaaatataggattctacatttattgttacaaggtgcgaggtataaaactaaatacgaagggaaaccatggtcaatctttattttccagagtcaagaatataaggatgaaagagattttgattatttcgatggattgttttccttagtgttagggattcgtattggaagagttagctttgtaatttgttttgaagatgcgggcatacagaaagtaatgtttgaggattattttagggatttgcaagagatatcattacatccgattcagtttaaggagatcatagcgaaagtacattataagcaaatcttatttagaaaaaatcctttctttatggttgttgaaggaaaagaaaacgatagaactgttttagtgaatcaaccaacaggagacttatttgatgaatgggatttcgaagattattcaaaaattttatcattgttttttaaaccttatggattacatttaaaagatatttatcacccacctggtaaaaccattagttttttatatggagaagaaggggaagttaaacatataccaaaataggtgtattatgaatgacaagataaataaaaaatgtataatttagggaaataagtcatctttgaaggcattgggaagaacccaatgctgtttttcattgttttacttttttgatttagttaatgccttctgctacctattgatataattcacccattttttctgtttccatagaaacctccagttttatttcaaaagctatatcaaatttatagatgtaggtagctaattaaaaattctttatcatcctcgtcttcaggcaaaataccaagagttttgtactcccataatgcaattctttgataccatctaactcagacgccaaaatatcgacattattataatcaagttggaattgactattgctatccaatgccaatgtatggttagtccaaacctgatcattattattttggtgcgcaattcttaatttctcaaaaagttctcggatttcccttaataaagttttgaagatatctttacttacgttgtattgggcaggtatatcttgtgaataaataatttggattattttctggttacttgaagtgaaagagaaccatggtagaatcatttaatacttctacataaagataaatttttgtccattcataaggtatgatgttatttaatttctgattaataagctgatacaaatcttgcatttttttagtttccaatcttttcaccttcaatcgtcgagaaatcttagttatcaaaatagctcagcagagaagggctgagccatttttgatttatagaccgaagtagtttattacaaattctttgtcgtcctcatctttaggcaatatccctaaattttgatatttccaaacatctcgtctttgaaggtcatcaagttcagaggataaaacattatcataattataatcaattgaaaactttccggtgttttctaattttaaagtgagattagtccaaatatcttggttgcctagtttaaattcctcttttagttcttcaaatagcttttgaatttcaattagcagttgatcgtaaatctcttcactcacatcaaagtgttccggtatataatgagaaaataaataatcactgttatttggtgttgtaaaataaaagtatatatctgctgagtcaccaagtatttcagcatataaaacgatcttttcccattgagatggaatcatttcatttagatgttcagcaatcttttgatatagttcacccattttttgagtttccattagattaacctctaactttgaattgttgatggcattatttaatatttaaataatccttaacaaattctttatcctcttcgtcttcggggaaaatacccaagttattgaactcccaaatcatttgtctttcgtattcgtccaaatcagactcaataacatcttcataatcataatcaattgaaaactttccagagctttcaagattcagtgtcaaatttgtccatgcttcgggattattttctttaaattcagtgtgtaactgcttaaacaactcttggaggtctagtagtagttcggtataaatttttttactgacctgaaattgttctggaatgtcgtgagagtatatatattcatcgttttctggtgtttgaaagaaaaaatacacttctctggaaccatctagtatttctgcataaagaacaactttgctccattcggaagggatcatgtcattaatttgttctgctattttttgatatagcacttccatcttttttgtttccactagattaaccccctggtttattttctatagtaacttgtctcgctctacgattacctatcttatattcaacattaaataatacaggtctaagtgaatctccctgataaaccggttctatattaacttttacttgcttaggaggttttccatttaacgcctttgaccacacttgctccattttgtaccatttcccgccgctcctattaatctgagaattcatcggcacgatattgtcgaactggcctgagcctttgaattgggtggcgattaaatggccgccgtcatcgtcaggctttcggtcctggggctttccagcattcgtctgtgcatattggtttcgttttgcttctcccagctgcaagtctgctttgacacttgtaattctaccatagttgtcagtcgtgtatgtgtagccttcttttgttttgtagatgatattgggcttcagcactttctttctgctccatcttgcgaaatgctcgccgtatttgacggttaccggcggtacatgtggtgctggagttcgtcttccgcttgatgacgttccgtatggtttcggaaggatgaccttggcgaatttttgcagtccttctttaagcgtgaccccgttgactgcgttgtaaggaacgcctgccggcactaaatcgtgacggggatgataggggagaatatccgcaagtgtgagatctccgatttgatttaatttggttttgacgtgtttttttgatacttctatgcctgtgtttactttttgtttgatgtgatcaacggtttgttttgagactgttatggctttttgggctgttgcagatttgcttgctgctgttttgacttttgccgtcactttggcggctgtgccagtttttgagacggcgccaacaccttttgtgccgacaactgatgtgacaacagtgcccactgcatatgagacccatcttgctcttgagtaggtgtcaccattcaccatgtctttttcgtatgattcttcgattgctgctgaaatggcttcatacgttttgatcgggtgagccacagctccggtaatcgcttcaacggttcctcccggatctgtgaccatatcccacaggcctacgaccgcgtccttcccggaatcataaaggccgacggcgacccctttgaagcctgcttcaagctcacgcgtgttttcaatttgggtgaagtatctctgctgttctgctgtcagattttcatagccaatcgtctttgccattgagtagaattcatcggcatccgcataatcatagtttttcagtctttctttcagtttttcaatctcgcgttccttcgcttcctctttcttaatcttcaagtaagcctcagtccgcttttcaatgtcgccttttttcttatgtatgtcactctcacggtacgctttggcgttgtagtggatgggtgtggcgtttttgcctttgcctgttgcttcttggagcttttggaagtcggacttgatgaattgttcgtttggttctgacagggcgtattctgtcttcaggtcttcgtccaaggcgtccaatttttccagtgtttttttgcgtttgtcgttggcatcggccagctcgtctttgaaggtttctgttgaaaacaggtcgagcgggaggatgtcgtcgatatcgttcaggatgtctttcatcgcttttttctgttcggacatgatggattttgattttttattggcatttgccagttcgtgctccaggaaggattcttcgatgtatgcgtcagagagggctttgtccttcgcggctccggcgatgctattgaaaaatgcgattttcatgtcgatgtagtcgatccattggtcggtgacgccgacgtggtcgtgatagaaggctttgatgttgctggcgccttttcctgaaaattcgctgtcactgagatcagcgacactttttaacgcttttctcaagttgaccatttgcgttcttagttctttgtactcttttgcacggtctgtcgcttccgaaagcagtgttttcgcttcaaatactttcatgaccatttcccttcttttgttcgctcaatatcaaaattttaccacggggcgggatgagggtgggggtgagaacgtgttttggtggaaaaatgagtcatttggcatgtgtctaagtacacggttttgatatgatgatgatagatcaattaaaaggggaagagctcatttggataaagatttcttaatcataaagatcaaggatattcaaaaaggcgacacgctaacgaaccgcgcctgcgggaactgggatatgaaattgtccagagcaaaagaatgtaaacgggcaattgttgttcggagcggtgtgattttaaatgtttacaagatcgttgacgcttgggaatcagatgaacccgccaagctcactaaaacgaataatagagttcggtttcaattggcagagtgccatgactattcttatatgattggcggtacgctgaaaacgaaaacgcaaaatccggtttcgagtctatccttagaaaccttaatggaactagtaaaataaaaggagcccagcatgtatctctataaagtaaacagccaaaaccaaatcgaagatattcgcgagaaaccgtttaaaaaagaaaaagagattcaggatttatgtgaaatcaatcttcagcggatgttggggctcaggtttgtgaaatctgaattcaggatcagcaatttccgcattgatacgttagcgtttgatgatgagacaaatgctttcgtgattatcgagtataaaaatacgaaaaacttcagtgttgttgaccagggctacgcctacttagcagcaatgctcaatcataaagcagatttcattcttgagtacaatgaaaatcatgatcttccgttaaagcgggatgatgtagactggtcgcagtcgaaggtcatttttatctcacctgtatttacggtgtatcaaaagcaatcgatccattttaaagatctgccaattgaattgtgggagattaaaaggtacgaaaatgatctgatccagttgaatcaaatgaaggctgatggcgtctccgagtcgattaagaccatttcacggcaaagtgagaccattcaagaggtcagcaaagaaattaaagtgttttctgaagaggatcatcttgcagataaaccgtttgacatcatagagctttatcagcagctaaaggaattcatttttaatttggacgatcatatttcaatcaaaccgacaaagctttatattgcgtttacatcaaataagcgaaatttcactgacattcttcttttaaaaagcggacttaagctgtgggtgaatatgaaaaagggagaattgcatgatcccgaggacagaatgcgcgatgtctctgagaccggccactggggaaatggcgactatgaaattttcataaaagatgatgaacacattgaatatatcatgggattgatcaaacaatcctatgagaaaaataagtgagaacttccattgagaagttcttttttattgtggcatgctaaagaagaattcatttcagtccctttcttcttctgtaaaaatgaaatgtacaaactgacaaaagacctataaaatgagaaagctatcatgagagagcagaagggtgagagagacaatgagttataaattagttgcgatgcttttatcgatactattcctattatcggcgtgttctaatagcggatcttctgataaggatcaggaaaagcaagcagtgaagaaagcgagcgttgcgatgctgacggagcaggaagtaaaatcagctttgaaaaacgatattgattcgatctttaatgcatttgataaagcgggaaaagaaaacggctggagcacggcaaacaaggcggatttcaacaagctgcggcctagtgtgctgccttatgcaacagaaacgtttgcagatcagaccttaaaggatttggccggagagtactattgcgagtgtgatgatccttttcaacccggctctgatttcgatgtgcgttttacatatgaacaggacaagaataagatagaggcttcatcaatagacccggcaacagaattaaacaacatgggcacggaatggacgtttgaattgatgaagcaagacggtaattggaagatcaacaaatgggacagcaagtcgcttcaaggggatgatatcaagctgacaaaagaagaagcgaaaacgattctgtctagaaacggtgaaacggcggaatttgtgaagtcctatgaatcgaaggctgccggcggaacagcttatcttttcaatgtgaaaagttcaaatggggaaagacaggcggcgatcagctcaaaggataccagtctggtaagtgataatgaaaacgagactgaagctccggagcaagagacagctcagacgactgcggaaaccgcatcgcctgatacagcggatacacagagcagtgagcagacaacaggaagcacaaaagcagattatgttgccaaattgtcagcgacagaacagaaagaaaagcacaatgactatcaaagtgattatcagatgattgaggattacggttacaattatcaaatgtgggacggattgctgaacgagatatacggcgtgctgcaaaagcagctttctgccccagacatggcggcattaaaagtgaaacagcgccaatggataaaggatagggatgctgcagcccagaagcgatatgatgaggagggcggcggttcattatcccgagtcgtccaaacggaagagcttgccaaacagacgaaagagcgctgttacgagctggtgaatacgtatttgaaataagattgacatgggacccttgcataaagggttcttttttatgaaaaaaacaaattgacaggatgaaaaaacaatttcttccttctatattgttttcaaaatttgggattgatagaatatgacatatctcatagagaaggagggaagccgttgagtcaagccataccgtcttcgcgtgttggtgttaagattaatgaatggtataaaatgattcgccagttcagtgttccggatgctgaggttctgaaagcggaggttgagcaggacattcagcagatggaagaagaccaggatttgctgatctattattctctgatgtgttttcggcaccagctgatgcttgattatttggagccgggacaaacatacgggaatcgccctacagtgacagagcttcttgaaacgatcgagacccctcagaaaaaactcacaggccttttgaaatattactctttgtttttccgcggcatgtatgaatttgatcaaaaagaatatgtggaagcgatcgggtattatcgcgaggcggagaaagaactgccgattgtgtctgatgaaattgagaaagccgaattccattttaaagtggccgaagcgtattatcacatgaagcaaacccatgtgtcgatgcaccatattcttcaggccttggacatttatcaaaaccatcccctatacagcattagaacgatacaaagcttgtttgtgatcgccggcaactatgatgatttcaaacactatgataaagcgctcccgcatttagaggcggcgctagatttggcaatggacattcaaaatgacaggtttatcgccatttctctattgaacatcgcgaacagctatgacagatcaggagacgatcagatggctgtagaacatttccaaaaagcggcgaaagtaagcagagagaaagtgcctgatctgcttccgaaagtcttgtttggattaagctggacattatgtaaagcgggccaaacacagaaggcgtttcagttcatagaggaaggattagaccatatcacagcacgttctcacaaattttataaagaattgtttctgttcttgcaggccgtgtacaaggagactgttgatgaacgaaaaattcatgatcttttaagctatttcgaaaaaaagaacctgcacgcgtacattgaagcatgtgcccggagtgctgccgctgtttttgaaagcagctgtcactttgaacaagctgctaagttttaccggaaagtgctgaaagcccaagaagatattctaaaaggagagtgtttatatgcctattaagaaaaaagtgatgatgtgtctggctgttactttagttttcggaagcatgtcgtacccattcctgacaaactccggcggcgttaaggaatcaacagatcgaaatacgacgtatatcgatcattccccttacaaacttagtgatcagaagaaagcccttagctagggctttttcttgctttacggaagacgttccattttccacatcacggcattccttctatttctaacgcaagacactcgaaacaaccaaaccatttgaggtataatggataaagtgaataacagtatttagattgatatatatgaaagagagtggaacatcatgggccgtaagtggaacaatattaaagagaagaaggcgtctaaggacgcaaatacgagtcgaatttatgcgaagtttggccgtgagatttatgtggcggcgaaacagggcgagcctgatccggaatccaaccaggcgctgaaggttgtgcttgagcgtgcgaagacttacagcgtgccgaaaaacatcattgaacgtgcgatcgagaaggcgaagggcggagcggaagagaattacgatgagcttcgttatgagggcttcgggccgaacggatcaatgattatcgttgatgcgctgacgaataatgtaaaccgtacggcgccggaagtgcgtgcggcgttcgggaaaaacggcggaaacatgggtgtgagcggatctgttgcttacatgtttgacgcgacggctgtaatcggtgtggaaggcaaaacggctgacgaagcgcttgaaatcctgatggaagcggatgttgatgtacgtgacattttagaagaggatgacagcgtgatcgtatatgctgagcctgatcaattccatgcggtgcaagaggcgtttaaaaacgcgggtgtcgaggaatttacagtagcggagctgacaatgcttgcgcaaagtgaagtaacgcttccggatgatgcaaaggaacagtttgaaaaattaattgatgcattagaagatttggaagatgttcagcaggtatatcataacgttgatttaggtgagtaaggagtgagcaggctgttatggcctgctttttttgtcccggaaattgttttagctgtatgtaggcggccgcctatacgatctataagatattctcatactctggactgtaacctatgtgaaggagagagtgaatatgactgatacaagacatatgtatggcggacctggttttggtcattatcagggctttggtattggccacccgggttatggcatgtatggaggccacccgggctttggcatgtatggaggctacccagatcacggcatacatggaggtgtcggcggctatccgggatatggaacgtacggaggatacggaggatccggcggttacccaagcggcggctatggaggctctccgggaactgtaaattatccgaacatgcaccatgaaaatgatggccatcaccactattatcaccatcatcatgatggaaaagataatcttcatcaccatcatcatgatggtcattatggccaccatcaccaccatatgggccactggggaaaagacggttataaataaagaagatgatggtataaagaggacactcttgcagatcaagagtgttttttatcttttttcttgactgttcagtctggaaactggtaacatttgtttcaggaggtgatcgtcttttggggaggaataaagaatttgatacggcacttgttcttcacagggcgatagaggtttttggagagtatggctacgaaggaacgtctcttcaggatctgctctctcatttaggcattgcgcgccagagcttgtatgatacgtatggcacgaagcgtgatttatttttgtccgctgtgaaaacgtatcttgaagggaaaaacactgccgttatggaaaggcttgaagcgccaggatctgtaaaggaagccattcgtgatatttttcaagaaggtgtcaatgctctgagggaccctgaacgggcgaaggcgtgctatatcattaacagcgcgattgaacagattccgcatgaccctgagcttgccctgtattttgaaagacaatccaagcagcttgaggacgctttttatcaggcgcttttaagagcgaaggaccaaggagaattgaatggcgaagatactgatatatctgcgcttgcccggtacctgaatcaaagcaggctgtctctgacatttgttgcgaaagtgacggctgatatggatcggcttcaggaccatgttgacgtgagtttatcagtgcttgattaacatgtggtaaaggattctttgcccatgtatgtatttttcggactgaatagtctagaaataaaaatgaggtgatgatgaatgttgatgaatgaatttgaaaaagcatgtgaaacattgagaaagtttatggcttatatgcttgagaaggacatgaagagctggacggagctttgggatgagaatgctgtatttgagttcccttatgcgccggagggatcaccaaaaagaatagaaggaaaagcggccatttacgattatattaaggattatcctaagcagatccatctttcttcatttaccactccgacagtgtaccgttcagcagactcgaatacggtgattgcggagtttcaatgtgacggccatgtgattgagactggactgccttatcgccaaagctatatcagtgtcatcgaaacgagagacggccgcattgtgcgttatagggattattggaatccgcttgttgtaaaagaggcctttggaggatcatttttgcaaacagaggagagtgggaaatgatgaaacagaatccgattttaatcacgggcgggactggcacagtcggcagccgaatcgccagccgtttaataaagctgggatacagagtgcgtattgcaagccgaaaaaagggcgcgcttgcaagtgcggagtatgtgtattttgattggaaggatgcctccagttttacgcctgctctagaacaggtaaaagacatctatcttgttgctccggttggtgtacttgatccggctccctatgtgcttccctttttaaaggaagcaaagcgtctcggcgcaaagcgggtagtgatgcaaagtgcgtctgttgtctccgagaacggtcccgtgtttggcgcgcttcaccaggcagtgcgcgagtttccagaatggacggtgctgcggccctcatactttatgcaaaatttcatcaatgtccagcaccgcatgtctattcaaacggaggggcgcatcacaacggcttcgggtgaaggaaaacttgggtttattgacgctgatgacatcgcagaaacagccgtcagggctttgattgatgatgttcctcatcaaacacatcatattctgacaggtcccgaggcgctgagctatgccgaagcggcggagatcattggagctgcggcgggacgccgggtggagcatgtcagcatttctcgttccgagctgcagcataaaatggaggcaggaggtttgcccgcggattatgcccattttatggcgaagcttgatgaggcaatcagccatggtgcggaacatcgggtaacggatacagtgaagcatgtgacgggaaaagaacctcgttcgctgtcagagtttgcggctgctcatgctgcatattggaaacactgacctcattttggactgaatagtctagaaagaccttcggcgcttccgaaggtcttcttattgaaaaagctaagtcgtgttttagtcataatcatgcctcctgcctcatacctattaaggtcattgtttttgagaaaggaggagccggaatgaaggatatgcagccgtttacgcctgtcaaatcatatacgccctttcacagccgttttgatccctgtccgcccatagggaagaaatattacagaacgccccctaacctttatatgacctttcagcctgagcatatggagcagttttcgccgatggaggctttgaggaaaggcaccctttggaaggatctctatgatttttatgaaaacccttatcgagggggagacgcacatggcaaaaaaggttgacgccgaatattatcgtcagcttgagcaaatacaggctgctgattttgtgcttgttgagctgagtctttatttaaatacacatcctcatgatgaagatgcgctgaagcaattcaatcaatattccggctattcaaggcacttaaaaagacagttcgaatcctcttacggaccgcttctgcagttcggcaacagccccgcgggcaaggattgggattggggaaaagggccatggccgtggcaagtataaggaggaatgcctgaatgtgggtgtatgaaaagaagctgcaataccctgtcaaggtcagtacgtgcaacccgacgctggcgaagtatttgattgaacagtatggcggagcggacggcgagctggccgcggctctccggtatttgaaccagcgttatacgattcctgataaggtcatcggccttttaacagatatcggtacggaggagtttgcccatttggaaatgattgcgaccatggtctataagttaacaaaagacgccacaccggagcagctgcgtgaagccgggcttggcgatcattacgtcaatcacgacagcgcgcttttttatcataatgcggcgggcgtgccgtttaccgcgagctatatccaagcgaagggcgatccgattgccgatttatacgaagatattgccgcagaagaaaaggcgcgggcgacgtatcaatggctgattgatatttcggatgatcctgatttaaacgattccctgcgttttttgcgtgagcgtgaaatcgtacactctatgcgcttcagagaagcggttgaaattttaaaagaagaacgggataaaaagaagattttctaataggcagattggcctctctttcatacacccttttacatacagagaaaatggtctgtttttgcagtttggtctgcattataatcaagggtgtgtaagcttactttttgattgggaggcctttatgtcagcttttaagattgagaacgaaacgattgcagatggattttacgcgtgtccggccgtctatgaggatgcagaatcgattaccgggttgctcgtccgaacagctgaatggctccgggatcggggttctaaccaatggagcggacttctcaaagggcaagatatacatgatatcacggggtcaattgaaaagggacatgtgtttgtgtttaaaaaagatgaagagcttgcggctgtcgtgatgctgctgcctgcaccgagcgagtgggaccggaagctttggggagacgatgggcatgaggagtccatttatttgcatcgcctcgcagtaagccgccggtttgcgggacaggggcttggagcccgcgtccttcagtgggcggagacgggcatacactttccgggaaaaacacggatccggcttgactgtgtcgctgataacgacgccctgcattccttttatcggcgtatgggatatgaattcatgggtgctgatgcgtccggatatcatttgtttgagaaagagattacggcagaataagcgtcctttgcagggggcttttttgtcttttctaaaagggagggcaggcgatgttgtggccaattttatttgtgacagggattgtgacggcttgtctgtttgctggcgtatccgttttgatgcggatgagatttcctgacaaaagtcggccggaatggatgttggccgggctgatcgtccttggtgtgtttgcgatctggtacagcctcgtgtatgtacgcggctgggaaggggctgcgctcggaatgcttggattcaatgtcattttcggagccattgccggatatttgatcgataaggccatccggcgttacaggaaaagataaggctgctgccgtctctcatcatgtcgaaattttcacagaccggcaggaattttctttcgaaaggagaaatacatattactttaaaatgaaagcgttttccaaagcgggaaggtgatgttgatgatacacagtgtgacaaatgggctgaatcgtttttgtacgtgggtgatgagactggcctatttgaatgtgctttggattttgttttctcttgcaggcctggttgtgtttgggctgatgcccgctactgccgcgatgtttacagtggcgagagaatgggcgaaggggaatacagatgccccggtgttttctgtcttttttcgggcgtttaaaaaggaatggcgggcatcacagatcctcgggcttatcgttgtgacggctgccctgtttctgtttgcggatatgcggatagcggctcagatggaccagcctgtgctcgtcaatgtattcctgagcattagtttgattttcgcgtttgttgtgctgtatgtgttcccggtattttctcattttgacgtaaaaatcagagaggtgctgagcatcagctttttcattgccttcagccgtccggcggtgacgcttttgatggcggcgggcgctgtcggtgtgctttgtctcgttctgtttcatgtcacgtttctattgtttttcagcgggagtttactcagcctgatcttaacgaagctgtcctttaaagcgtttcggtcaatggatcagcggcaggagaaagaaaaggcggcatgaagaaaagagttgctggctggtacaggcggatgaagattaaggataagctgtttgtgtttctatcgttgattatggccgtatcctttctgtttgtatacagcggggtccagtatgcctttcatgtgtatgatgagcagatttaccgcaagtcctcggaggtgcttcggatgtcttctgaaaggatcgaagacgagctgaagaagatagaggatgtgtcatatgaaatcattacggacgaacagattcagcgcatcctgagcatgcaaaatcgcgatgatacgtacgatcagtatcaaatgaagcaggagctgtgggatcagctggcgggatatgccagcgatgaaaagtacatcgattccattcatgtgattgatgcccgcggctcagagtattcagccggaagcagttcttcagatcttttgcagcaggagcaggaagaggtatttaagcgagcgaaagcgaaaaatggaagaaatctttggatgacgctcggcgggtcagatcctgtcctgatttcagcacggcagatcaggtcctatcaccagctgagtttgaacggcttgggcatggtgctgatccaggtcaatgtaaaacagatgattcgtgatgtgccgaaggattggggcgattcagtcggagacattatgattgctgaccaaggcgggaatttggtgtatacggcacatgcatcagcgcatgttcctgaggcagcaaaagagacgctgaagcaccccggttatgacttgataaaaaagaatggcaaacgttactttatttcttatcttcaatcatcctaccaaaattggagctactataacgttatcccctttgatcagatgttcgcgaaaatttcctttatgaaaacagtgatcggcacatgctttctcctctttttctgtgtggttttgcttttcggaaggaaaatcgccaacagcatcacggagccgattgaacagcttgtgaccgcgatgaaatcggtacagcacggcggcattgaagcaggtgtgtcgctttctctgccggaacatacacaggatgaggccggcatgctgaaccgtcattttactgtcatgatgaaacggattaatgagctgatggaagaaaatgtggaaaaacagctcatcattaaagaaaccgaattgaaagcactgcaagcccagatcaatccgcattttttatataacacgctcgagtccatcaattggctggccaaggcgaatcagcaaaagcaaatctcaaaaatggtggaatcgctcggttttcttctgagaaacagcatacatatgaaaaaggatatcgtgaccatacaggaggaggcggacattttacgtcactatatgaccattcagcgatttcgatttgaagagcgcctgaatttcacgttggatattgacgatgaggtgaagcattgcctcattccgaaactgacgctccagccgcttgcggaaaatgcgattcaatacgcgcttgaaccctttacaaggccatgcgccatccggattcaggcgaaaaaggcaaaggaatgtgtctgtattacggtcgaagataacggccctggcatggatggacggattcttgaatcaacgggcggaagaggaatcggactttggaatattcgcgagcgcatcagcctgacattcggagagccatacggcttgcggattcatagtgagcatgaaaaggggacgaggattgtgatcacaataccgtgccgaaatgaggtggtgtgatgtataaaatactgctggctgatgatgagaggattatccttgatggaatggcaggaatcattgagtgggagtcgcttggcgcctcattgatcggtaaagcgcagaacggacatgaagcatatgaaaagattgtacataagcagccgcatatcgtcatcacagacgtcaaaatgcccggcatggacgggcttgagttgatcaaaaaggtgtcagccatcagtccgtcggtgcaatttatcgtcctgtccgggtttggagagtttgagtacgcaaaggaagccatgaaatatggggtgaagcattatttgctgaaaccctgcaatgaacagcagattatcagctcgctggaggaaatcattgctgagctgaagcggcaagatgtgcacaaaaagaaaacagcccatctgaaacacgagctggaccatatccgttcctttgcagccgatcaatacttggaaggcttgatcgcaggtgtagcccagttgtctccgccgccttcacttgccggaaaaaagatccgcctcttgatcttaaaaggggaacaatctattgatgccacaaccagagaggcactcggatcggcactgacagcggtttgcagcagcggagaatggacagtgctcgccgtagaggagaacgccgctgaaaaggcggcggaggtttttgcggaccgcaagatggccatcagtcaggcgggagaactccggcacgcggggcagctgtttcgtgacacagctgaagcgtctggtgacctgcatgggagcgcagtgatttcaaaaatgatcaggcttattgccgacgagctcggaaatccgaatctgtccttaaaatgggcggcgaaggatatgctgtttatgaatcctgattatctcgggaagttatttaagcaggaaacaggcgagaaattttcacaatatgttacacgagtgcgtcttgaacatgcgataaaacagatgaaaatgaggcgggatgcgagtgtatcagaaattgctgaagaaatcgggtttggcgataatccgaagtatttcagtcttgtttttaaaaaatataccggtctgacaccgtcagaattcagaagaaaacagggaggcgcttccgcaggatagccatctctgtttttttgactttcgccactgttttttgagtgtttcgccctatccgaacgctttaaaataaaatgtaagcacttacattaaaaggggggattggtttgaagaagatttgttacgttctgttatcgcttgtctgtgtctttattttcagcgggtgttctgtgggcgaagaggcctcggggaaaaaagaagacattacgctcagaatcgcgtggtggggcgggcagccaaggcatgattatacgacaaaggtaattgaactttacgagaaaaagaatccgcacgtccatattgaagcggaatttgcgaactgggatgactactggaaaaagcttgcgcccatgtctgccgccggccagcttcctgatgtcatccaaatggataccgcttacttagcccaatacggaaagaagaaccagctggaggatttaacgccgtatacaaaggatggaacgattgacgtcagctcaatcgacgagaatatgctgtcgggcggaaaaatcgacaataagctttatggatttacgctaggtgtcaacgtgctgtctgtgattgccaatgaagatttgctgaaaaaagccggtgtgtctatcaatcaggaaaactggacgtgggaggattacgagaagctggcgtatgatcttcaggaaaaagccggtgtctacggttccaacggaatgcatccgcctgatattttcttcccttattatttgcgcacaaagggtgagcgcttttataaagaagacggcactggcctcgcgtatcaagatgatcagctgtttgtcgattactttgaacggcagctgaggctggtgaaagcgaaaacgtccccaacacctgatgaaagcgcacagattaaagggatggaagacgattttatcgtcaaaggcaagtcagcgattacatggaactactccaatcaatatttgggctttgcccggctgacagactcgccgctgtctctctatctgccgccggagcaaatgaaggaaaaggcgctgacattgaagccgagtatgctgttttccattccgaaaagctctgagcataaaaaagaggcagcgaaatttattaatttcttcgtgaataatgaggaagcgaaccagctgattaaaggcgagcgaggcgttccagtctccgacaaggtggcggatgcgattaaaccgaagctgaatgaggaagaagccaacatcgtggagtatgtagaaaccgcgtcaaaaaacatcagcaaagccgatccgccagagcctgtgggaagcgcggaggtcatcaagctgctgaaggatacgtcagatcagattctgtatcagaaggtatcgccggaaaaagccgccaaaacgttccgaaaaaaggccaatgagatattagagaggaataattgacgggaatggggctgacgcaatgaaaaaaagccggagtataagaaaagacaatctggcgggatatgcttttatttctccgtttatcatcgggttcctatgctttacggtgatcccgatgggggcgtccctgtttctgtccttcacgagctatgacttgtttacggcgccgaaatggatcgggctcgacaactttaaggaaatgtttacgggtgacgaaaagtattggcagtctctgaaggtgacgtttacgtatgtgcttgccggggttccgctccgtctcggcttcgcgctttttatcgctgtcattttaaacaatgcagcaaaaggaacggccatttacagaacgctcttttatctgccttcgatcatcggcggaagcgtcgccgtggcgattatgtggcgcaatatttttggcaatgacggggtcatcaatgcgctgctgttttttgtcgggattgaccaaaaaattctttggtaccagaatccgacaagtgcgctgtggacattgattctgctgtccgtctggcagttcgggtcgtcaatgctcatttttctggccgggctgaaaaacattccgtcttcgtatttggaagcggcaagtgtggatggggcaaatcgggtgcagcgtttcttcaagatcacgcttccgatcctcacaccgattattttctttaacctagtgatgcagacgatttctgcttttatgacatttacacctgcctatatcatttcgaagggcgagggcgggccgcttgacgggacacttctctattcgctctatttgttccagcgtgcgtttaactattttcaaatgggctacgcatcggcgatggcgtgggtcatgcttgtcattgtcgggctgattacgctcatattgtttaaaacatcgtcatattgggttcattacgagtcaaaggaggaatgacggatggagccggtcaacgagcctgtcagaaaagccccggtttttgaaagaaaaaaagccgggcgcgtcagtcccaaacgcatactgttccatgtttttacagcaacgctggcggtgttactgctgtacccggttatttggctgtttgtcagctcgtttaaagaaagcgccagtatttttacaacctcacattctctcattcccgacccttttattctcagtaactatgctgaagggtggaagggtatcgcgggacagccgtttctgacgtttattaaaaactcggcgatcattgtcggactgtcaacaatcggtgccgtcctgtcatcggctgtcattgcgtatggatttgcgcgtattccgtttaagggaaaaaaattttggtttgcgtgcatgatggggacgttaatgctgcctcatgaagtgttgatgattccgcagtatattatgtttgcgaaattagactggctgaattcctttaaaccaattgtcgttccgcaatttttcgggcatgcgttttttatatttctgatgatccagtttatccggacgattcccgaggagctggatgaagccgcgcgaatcgacggatgcgggcgctttgcctgcttttggcgaatcattctcccgctgattgcccccgcgcttgcgacgtctgcgattttctccttctattggaagtgggaggagctgattcaaccgcttttgtatttgaataagccggagctttaccctgtttcacttgcgctgaagctttttctcgatacagagtcggcttcgaactggggcgcgatgtttgccatgtcggccgtctcgttattgcctgtgattcttgtattctttttgtttcagaaatatatcgttcagggcatcagtacgaccggattaaaataaaaaggagtgttgcagatggcacagcttatctttgatgaagaaaaggtgacgtcggttattgaccggatcgtgaaacggacatttcagatggattttgcgtgggattggccgggcggcgtcgcgttttacggtgtggcggaggcctatgaagcgacggaaaacgaggaatatatcaatctgttaaaaacgtgggtggatgaacagctggaggatgggctgccgccgctttcgatcaacggagtttccattgggcatacgcttttgttcctccacaaggtgacaggtgatgacgtgtatttggaaacagcggccgagatggcggaatatgtgctgcataaggcgccgcgctttggcgagggtatccttcagcatacggtgaatgcggcagaatacgtattccctgaacaggcatgggcggatacgctgatgatggctgggctgtttatgctgagaatcgggcggatcatggagcgtgaggattattttgaagacggtctgcgccagtttcacggacatgaggatgtgcttcaggaccctgtcacgaatttgtactaccacgcctgggacaacaaagcgcaaaatcatctgtcggggatttattggggcagagcgaacggctgggcggcactcacgatggcaaaggcgctcccccttattgaggtgacacatccttcctttatgatcatcgacggatcgctcagagaccagctgagcgcgcttgtccggcttcaggatgaatcagggctgtggcatacgattttggatgatccggattcttatctggaggtttcggcatcagcgggtattgcttctgctctgatgtcgagcggaaagctgtatacaaaatatgtgcagaaatcgcttgccgccattttggatgcggtggaagaggacggacgggtcagcaaggtatcggccgggacagccgtcatgaaaaatgccgaaggatacaaacaggtgccttacaaacgaatacaaggatgggggcagggacttgcgctgacgtttcttgctgatgttttgaaaacgaaaaaacgcgtgtatcagtaaagacagcggcggggggaaagggatgaaaaaacagcctcaacagaaggaacgggtttctcgctggaagggaaggtatttcaaaagaaactttgtcttcattttgctgattgcctgtattcccggattgctgactggcggcgcaatctactttctttcgatcgacaaggtggagaaagagctgcagagatcgcatgaaacacaggtggcgcgtgaggtcagccgaatggatgagaagctgggagtgcttgaactggcactcacccagatggcctacgattcttcactgatgaacggattggccgagagggatttggagaaagactttacgttctcctatcaattaacgaaaaaactgtttcttttgcgggaccagcagccgctgatcgagcaggcttccatctttctgaacagcccccggccacttgtgctgagccctgaatacagcgctttgacagaacaggaggcgcttcgcaagtatcgctcgctacttgcctcagaccacagcatttattggaaacggtcgggaaatcaagcgatgctgatccagctcattccgggcgcggctgagaaaccgttcggcgcgatcatgctggcggttgatccgaaagaaatggaatcaatcctgcaaagcttgtccccctatcctgatggcagtgcgctgcttttagatcaaaatcaagaggtgctgtttcatgaaggggaaaaagattttaaaaagactttacttcaagagataaaaaaacagcctgctgagaaaggtcatattcagatggaatgggaaggcaaggtgtattctgtctcctttggagaaatgaaccggatgcatcagcaatggacctttgtgtcagcggcgcctctttcagctattacagcgccgatggtgtttttatcaaaagtgatcatcgtgatgctggtcatttgcatcggtttggcggtatgcatgacatggtatgcatcaaaaaaaatctatcgtcccattcagcatttgcttggcttgtttaccggtggagagaagaaagtatggcaggcgtccgggcaggatgaattcaagtggattgaaaagagatggcaggatctatcccttgaaagccggaagctccaagagcagctcctgcggcagacgccccatatgaaaaagagttttttgcagcacctcttgcagggggatttttactatgacaacgaggacagtctcagatctcggatggaggaggccggctggaacatcggcgaaaacgtgtttcatgtgctggatcttcaattgacaggactccgctgtgaaaaaagcatcttctgttgcgatgatgaacagctcgctgtgtttacactgactaatatcgctgaggaattggcggataaacgcgtttttcagctctccatacttgatatcggccggctttctgtcaccgttcttgtgatgaaaacaaacagctctgatctgaaggcgtatataacggagctggcacgccaatttggagatgtaaccggactatgcctgacctcgacattgagcagcaagacggagcgtgtcacggaaattccttctttatttcaggatgtgaaatgcggcaaatcccgcaggaagtttgctaaccgggatcaggtcattgatttgcaggccgacttccctcaggatgagcagttcgctccttattacccttttgagctggaaaaacaaattgttcaggccatccggctggaaagaaaacaggaagccgaggaactgatagatggatgtatgagggaactggcggaaaaggcggccatagacaggcatgtgcattccgccctgattcagctgttttcccgcattcaggaggatattttgcattccgggctcaatcctagcgaactgtttcagcatcggaacccgtttcttgatatttcagaattgcgcgaacctaatgaagcggcggcctggctgatggatgtagtggtgacgccttacctttccaagcttgagggcagaaaaaacagacagcaaaagcagctggcagaacgtgtgattgcgatgattcacgaacagtatatggcggatatttcattggaaagctgtgccgatgcgcttggcatgaattcatatacgttaagcaaggcatttaagcaagtgaccggcattaattttatcgattatgtgacccagatcagaatcgaaaaggcgaaagaattgctggtcaatacgaataaaaaaattcatgacgtgtcagaagaagtcggttaccgccacaattactttaaccggatttttaaaaaacaggtcggcatgccgccgggtgtcttcaggcaaatgtatcaggaaacgccgtgaaaggagagaacatgtgatgaagaaaccgattcaagtatttttagcgggagattccactgtgagtgactgcccgcctcatgaagcgccgatggcggggtgggggcaggtattcgggcaattgttttctgaagaggtagtggtgcacaatcatgccaaaggaggagcgagcaccaattcttttgtggaggaaggaaggcttcaagcaattgccgaacgcatcacacaaggcgattatctgttgattcaattcggccacaatgaccaaaaaccgcgggggacgaagccgtactccacgtttcagcaatttctcaccctgtttgcagatacggcacgcgaaaagggcgcgcatcctgtgttcgtcacatcggtgcagcgccgccgcttcgatgaaaacggacgaatcgagcattccctcggtgagtatcccgatgcgatgaaagcactggcgaaggagctcgatgtacctgtgattgatctgcttgcgaaaacaaaggtgctgtatgaagcatacgggccggaggagtcgaagcgattgttcgtttggtttcagccgaatgaacatccgaattacccggacggcattgaggacaatacgcatttttcggaagaaggtgcaatggaggttgcgaagcttgtggcagaaggccttgaagagatcggacttccgcttaaggaccaccttgtgagccgggagggaaaagaacatgtataaggaaggcacttgcttgtaccgcaatccgctccggtctaaaagcgatgtgaaggactggcggatggagggaggcgggcagatctcatttgacgatcacagcttgcacctgtcacatgtccaggatgaagcgcactttgtcttttggtgtccggaaacctttccagacggcatcattgtgacatgggatttctctccgattgagcagcctggactgtgtatgctgtttttttctgctgcgggaatgggaggcgaggatttgtttgatccaagtctccagaaaagaacgggaaaataccccgagtatcattcgggggacatcaatgcgctccacctgtcgtatttccgcagaaaatacgcggaggaaagagcgttccgcacctgcaatttaagaaaaagccgcggtttccacctcgccgcaatgggggccgatccgctgccttctccagacgacgctgattctccgtatcgtatgaagctgatcaaagacaaaggctatgtgcacttttcaatcaatggtctgcccattcttgagtggatggacgacggcagcacatatgggcctgtgttaacaaaaggaaaaatcgggttccggcagatggcccccatgaaagcagcttacagggattttgtcgtgcatcaagcggtgagaagatgaagacgactgtaacggatgcgctttatgcaggctgcgaagcggtggtgaaaatagcatggctcaacgggctgtggctgttgtttacacttttgggcggcgttcttttcggatgggcgccgagcacagccgcgatgtgtgccgttataaggaaatggctgatggggcaaaaggatgtcccgatatttccgttatttctcgatacctataaaaaagagtttctcaaggttaatgcgatcggattggcgttttgggctcttttgctcatattgtccgcgaactatcattatttttctgccagtacggattggctgtcctttgccgtaacaagctgcacgctgcttgcagggcttttgtatatcatcgcgctgatgtatgtgtttcccctttatgtgcattaccagctcccgcttcgcaaatatataccgcaggcactgctatttggcgccatgaggccgctgacaactggctgtatgctgatcgggtgcggatttgtcctttatttgctttatacgcttcctggcctgatcccattttacggcccgtgtttatttgggcttgtgttgatgttttttgctcttaggggatttcaaaagacggaggcccagcaccatcaagccgggtaacaaaaaaatgacaaatacgcaaaaaagtgcagtgtccgaaataggcagatgcaaaaaagtgaaattgaagacagctcacacagcgcataaaatccaatttaagtaagcgcttacaaataaatgagaaggagctgtctgatgattacacgaaggaaacgcatgtttaccgctgttacgttgctggtcttgttggtgatgggaacctctgtatgtcctgtgaaagctgaaggggcagcgcggcagatggaagcgctgaaccgggggcttgtagcggtcaagacggacgggggcatttttgtcagctggcggtttcttggaactgaaaacgcatctgttttgttcaatgtgtacagagacgggcaaaaactgaatgctgcgcctgtcaaaaccacgaactatgtggataaaaacggttcggcgggctcaacgtatacggttcgggctgttgtaaacggtaccgaacagccggcttctgaaaaagcctccgtatgggcgcagccgtatcattccgtcccgctggataaaccggctggcggcacgacgccaaagggtgaagcttacacgtacagcgctaatgacgcaagtgttggcgatgtggatggtgacgggcaatacgagctgattctgaaatgggacccgtctaactcaaaagacaattcacaggatggctatacgggtgacgtgctggttgacgcgtataaactggatggcacaaagttatggcggatcaatctcggcaaaaacatcagagcgggcgcgcactacacccagtttatggtgtatgaccttgatggtgacggaaaagcggaagtggcaatgaaaacggcagacgggacaaaagacggcacgggaaaagtaattggaaatgccaatgctgattacagaaatgaacaggggcgtgtgctttcaggccctgaatatctcactgtgtttcaaggttcaaccgggaaagagcttgtcaccgcaaattttgaaccggcgcgcggcaatgtgtcggattggggagacagctacggcaaccgtgttgaccgttttctcgccggcattgcctaccttgatggacagcggccgagcctgatcatgaccagagggtattacgctaaaaccatgctagttgcctataacttcagggatggaaagctgtcaaagctttggacgctggactcctcaaagtcaggaaatgaagcgtttgccggacaggggaatcacaacctgagcatcgcggacgttgacggggatggaaaagatgagattattttcggctcaatggctgttgatcatgacgggaaaggcatgtactcgaccggcttaggccatggggatgccctccatacaggagatcttgatccgggccggccggggcttgaggtgtttcaagttcatgaggacaaaaatgcaaaatacggcttatctttccgggatgctgcaaccggaaaaatcctttggggcgtttatgccggcaaggatgtaggccggggaatggctgctgatattgacccgcgttatccgggacaggaagtgtgggcaaacggttctctctactcagcgaaaggagtcaaaatcggaagcggggctccgtcctcgaccaacttcggcatctggtgggacggcgatctgctgcgggaacagctggacagcaaccgaattgataagtgggattatcaaaacggcgtatcgaaaaatgtgctgactgcatcaggcgcagcggctaacaacggcacaaaagcaacaccaacgcttcaggctgatctgctcggtgactggcgcgaggaagtggtgtggagaacggaggacagcagtgcactgcgcatttacacgacgaccattccgactgagcacaggctgtatacgctgatacacgatccggtgtaccggcttggcatcgcctggcaaaatgtcgcctataaccagccgccgcacacaagcttctttttaggagacggcatggcggaacagccaaaaccaaatatgtatacgccttaactgaaagggggaaggaacgggctgcgcgcagcccgttcccattaaaatgaaaccaaaaaagaggcaaatggaatacctgaccagaggtttgattgcggtaaagacagaacagggcgtgtttgtcagctggcgttttctcggcacggatcatgagacgacggcttttcacctttatcgggatggaaagcggatcacccgcgatccaatcgatgaaagcactaattttctcgatcaaaatggaacggctgactctgtttatcaagtggcggctgtcaataaaggacgggaagaaaagctttccaaggaagctcgtgtttggcaggaaaatgtcctggaggttccgcttgccaaaccggaaggcggtgtggcgccggacggaaagccgtacacttacagcgccaatgatgccagtgtcggggatatagacggggatggagaatatgaaatgatcctgaagtgggacccatccaattcaaaagacaacgctcatgacggttataccggggaggtgctcatagatgcctataaactggacggcacctttttgtggcgcatcaacctcggcagaaacatcagagcgggcgctcattacacgcaatttatggtgtatgaccttgacggtgacggaaaagcagaaatcgccatgaaaacagctgacggcacaacagacgggaaaggacatatcatcggtgatgagcatgccgattttagaaatgaacagggaaggattctgtccggaccggaatatttgacggtgtttaaaggagaaaccggtgaggcgctcacgaccgtggaatatgaaccgccccgcggcaaactggaggattggggagacggctatggaaatcggatggaccgttttctcgccgggatcgcttatttggatggggagcggccgagcctcgtgatggcgcggggctattatacgagagccgttctcgtagcatacgatttcagaaacggaaggctcaaaaaacgctggctatttgactccaaccagcagggccatgaagcgtacgcaggacaggggaaccacagcttgagcgtggcagacgttgacggagacggaaaagatgaaatcatatacggcgcaatggctgtcgatcatgacggaaccggcctgtactcaacggggctcgggcacggagacgcgatgcatgtaggggatctggacccgtcacgaaaagggcttgaagtgtttcaggtgcatgaggacgccacgaagccgtacggactgtcactgcgagatgccggaaccggtgagatattatggggcgtccatgctggaactgacgttggccggggcatggcagctcatattgatccaagctacaaagggtcgctcgtctggggaattgatccgccgggcaatgatggcatgtcgtatgggcttttcacgagcaaaggcgaaaaaatcagcgacaaagcgcccgcttcagccaatttcgccatctggtgggacggtgatttggtcagagaactgcttgatcatgactgggacggaacgattggcaggccaaagattgaaaaatgggatgctgaaaacggctgtctgaagacgatatttcagccggccggcgtgctgtccaacaacggcacgaaaggaaacccggttcttcaggccaacctgttcggagactggcgggaagaagtgatatggagaacggaagacagcagcgcgctccgtatctatacaacgacacatctcacccgccaccgcttttacacgctgatgcatgatccggtttacaggctcggcatcgcctggcagaataccgcctacaaccagccgccgcacacgagcttttacctcggaacgggaatgaaaaaaccgccgaagcccgccctgtacatagcgggaagtaaagcggaggcgccgctgtaggaggactaagggataagacgcaaaggctgaacgctacgacaagatgattaacgaacgggcaggacgaaccaatgctcaagcgctgtacgcaccggtctttttcaagggaagagctatccgtgatggaagctgtataaaaaacgaggaggaatgaaaaaatggcaaatcatatttatcttgccggcgattcgactgttcaaacgtatggagacagcacaaatcaagggggctgggggcagtttctcggctcgcatctgccggagcatattcaagtgatcaacagagcgatcgggggaagaagctcgaaaacatttgtggaagagggcaggcttcaggcaatcctcgatgtgattgagccggatgattggctgttcgtgcagatgggccataatgacgcgtcaaaaaataagccggagcgctacaccgagccctatactacttataaacaatatttaaagcagtatatcgcaggcgcgcgggaaaaaggcgcccatccgcttctcattacccccgtagcccgctttcattacgaaaacggcgtgtttttgaacgattttcctgattactgcattgccatgaagcagacggctgaagaggagaatgtccagctcattgatctgatggagaaaagtctcgctttctttactgagaagggcgaggaaaaagtgtacacctattttatgatttcagaagggattaacgattacacgcattttacaaaaaaaggcgcaaatgaaatggcgaaacttgtggcaaaaggcataaaggagctcggcctgccattgacagaatcgatcatcaaagaaaggtgaaaatgggatgagaaaactgtatcatggcgcttgctattatccggaattatgggatgaagagacgattcagcaggacattgacatcatgcgtgaagttggcgtaaatgttgtgcggatcggcgaatttgcctggtctgtcatggaacctgaagaaggaaaaattgacgtcggttttttcaaagaaatcatcgcccggctgtatgatagcgggatcgaaacgattatgtgcacgccgacgcctaccccgccgatttggttctcacatggccggcccgaacgcatgcatgccaatgaaaaaagagagatcatggggcatggctcccgtcagcatgcctgtacgaacaacccgtatttccgaaaaaaagccgccatcatcaccacagccatcgccaaggagcttggccggctcccggggctgatcggatggcagctagacaatgagtttaaatgccatgttgcagaatgcatgtgtgagacatgcttgcgcctatggcatgactggctcaaaaatcgctacggggtaattgagcgcttgaatgaagcttggggaaccgatgtgtggagcgagacctatcagacgtttgagcaagtcccgcagccgggaccggccccgtttctgcatcatgcctctctacgcactatgtatcagctgttttcgatggagatgatcgcttcgtttgcggatgaacaggccaaaatcatccgctgctattcagatgcgccgatcacgcataacggatcagtcatgttcagcgtggacaatgagcgaatgtttcagaatctggattttgcctcctatgacacgtacgcttcgcaggaaaacgcctctgcctttttattgaactgtgatttatggagaaatctgaaacaagggcgcccgttttggattttggaaacgagtccgtcgtatgccgcctcgcttgaaagctccgcttacccgcacgcagacgggtatttgcaggccgaagccgtatcgtcctacgccttagggagccaggggttttgctactggctatggcgacagcaacgttcaggcagcgagatttcccacggttcggttctcagtgcctggggcgaacccaccatcggctatcaaaaggtgctggcggttgagcgggcaagaaaggaaatcgagcctattattctatcgactgaacccgttcaagccgaggcggcgatgacttactctgacagagcaaaagcatttattaaaactgagcctcaccggggactccggcatcgttcgcttgtgacgcatttttatgaacgtattctcaacacggggattcaccgtgaccttattccggaaggcgctccactggacggctatcgcttgctgtttacgccatttgtgccgtatttgtcttctgaatttatcaaaaaagcttcggcattcgctgaagcgggcggcatctggatcaccgggccgctgacaggagggcgcacatgcgagcataccattcataccgattgcggacttggcgaacttgagaaaacgtcagggatcaaaacactttttacctttccgatgaatgagaacgtgaatacaggaaaagcgtttggcatcacggcgccactcggactatggagcgcggtgtttgacacagagagcggaaacacccttggcacggttgaatcaggaccgggggcgggccatgcttttctgacggaacagaattacggcgaggggaaaattgtcatgctgggatcgcttccatccgggaaagaaggggatgcgatgctggaagcgctcgtcaggcattatgcggaggaagctgttatttccagccggtcggatgtgacgcccggcacgatcgttgccccgcgcaaaggcgaaaacggccttgtgtggatcgttgtgaatatggatggaaaaggaggaagtgtgacactgccggaagcgggaacagatctgttgacgcaccgcttggaaaaggcggggaggctggcggtcggaccgcatgaataccgtgtgattcaatttgacaatcacagctgattctttgcatcgaatcagcttttttctatggagggagagaccgatgaaaaagatcaaatggttatcaggacagccaaaggtgataagtggtgtgacgtggggcgtgccatggaaaaaaggagaattaaaaaagggtgaccgtctggcgcttatgaatgaaaacgcggaaatgcgatatgtgcaaagcgaaccgttggcctattggccggatgggagcatcaagtggacgaagcacgcggcggtgtttggtggtcagagaaaccaaatatttacagttcgcaaaagagaagtgccgcagccaactgaatcgctcagcattcatgagacagagcatgatatccaagtgaatacaggagcactcgtttgtaccattcataaaaaaggatctgatttcattcaatcattgcagatcaatggaaagccgatcgccgcaggcgggaggctcgttgcgataagagaaacgagaaaggagtcggcggcggaaacggttcttttgcatgaaaggtctgtcagctttatcaaacgggcggcgattgagcagagtggtcctgtcaaagcagtagtcaaaatcgagggagtgcatgtgctccataaaacgtatgaggaatggctgccgtttgtcatccgattaacgttttatgccgggctgtctgagatcggccttgtgcacacgcagctgattgacaggagcggtaaacaagaattcataaaggggctcggcatcgaattcgacctttttttggagggagagccgtacaaccgccatttccgctttgcgggagagaaagggatgtacaaagaacccgcccagctgtttggcacacgtaaattcaatgaacgatatccgctttatgaaaaacaaatcaatggcgaaatgctgtctccagatgaagagcataaggaatggtttgcacatggcacacagaatgtggtttgggacgatgtcaagcttgtgcaagattccagcgatcattacagcctgtcaaaacggaccggaaaagattatgcgtgggttggaatgctgcatggcagccgggcgaaggggctctgctatgcgggcggaaaaaatggcggtgtggctctcggcctgcggtatttctttgagaaatatccttcagcactggaaatcacaggtcttgccggcagccgccccaaaatgactatctggctttggcctccggacggcgaagcgatggatttgcggcattatacaggaaacacccacgtggccagcgcgtatgaaggatttgatgaaatgcgctctgatccgacaggcattgcgaacacaaatgaaatcagcctggcgtgcttttcgcacatgccgtctgacgaagtccttaatgcactcgctgacaaatggcaggcgccgccgctcttgatatgtgagccaaacgtctattacgaatcaaaagcgctcggggtttggagcatcattgacacatcccatccgctcaaaaaagagctggaggaacagcttgacgccgcctttctgttttataaaaaggaagtagagcagcgcaaatggtacggtttttggcattatggcgatgtcatgcatacgtatgacccgatccggcatatgtggcggtacgatctcggcggatacgcatggcaaaacaatgagctcgttccgaccttatggctgtggcaggcgtttttccgctcaggcagagaggatatctttcgcatggcagaagccatgacccgccatacgagcgaaacggacagctttcacctcggtgaatacgcaggacttggttcacggcataacgttgtgcactgggggtgcggctgcaaggaagcgagaatcagcatggccgggctttataaattctattattatctgacgggtgatgagcggacgggagatcttttgacagaagtgaaggatgccgattatgccctcgtcaaaaccgatccgatgcgcgctttttacgagaaaggcaagcacccgactcacgccagaacgggaccggactgggcggcgttttgctcgaattggctggcggaatgggagcggaccgaaaatccggaatatctccacaaaatccaaacgggaatcaactgtctgaagcggctgccgctccgcttattatccggcccgacatttgaatatgacccggcgacctcgatgcttcatcacatgggagacggcattgcgggcggatatcatatgatcattgccttcggcgcgccgcaagtgtggatggagctggctgagcttcttgatgaccgggaatgggaggatatgctgagtgaattcggcgaattttacacactcagtgatgaggaaaaacgaaaaaaaagcggaggcgctcttcatgacgggcattttcactggccgatgttcgccgccagtatgacagcctacgccgcaagaaaaaaacaagatcctcatctcgccgccaaagcgtggaatcttttgctagaagataagctcagccatacgccgcttccgatcaaaccggagcgcatcgagacatggacgcagctagaggagcttccatgggtgacaacgaacactgtctctcaatggtgtttaaatgtcatagcggcgctggaactgatcggagattcccttccggcaaaaaaagaaacatcgggcaaaaaaggataacagccggaatttcataggagaaatggtgcaaaaaatgaagattgcaagaatttatgtaagcgctttatattgagaggggcaaaggggaaatgcaaattgaaaaaagggggacttacgcaacatgaaaataagaatgcgaaagaaatggatggccttgccgcttgctgccatgatgatcgccggatgcagccattcggaaacatccaattcagcaagcggttcgaaagatacgatcaaaattatggcgccgcttttatcgccggaaagcccgagtgataagagcccttcattaaaagcactcgaaaaatacacaggcaaagagattaaggtcacatgggtgcctgattcatcctacaacgacaaattcaacatcgtcatggcttcaggagagatgcctcacgcgattgtcattaaagataagtcagccggctttatcaaatctgtcaaagcaggggcgttttgggagctgtctccttatttaaaagactacaagaatttaagccaggcagatgaaaagattttgaagaacagctcggtgaacggcgaggtgtacggaatctacagaacgagggatctgatcagggcgtgtatgatcatcagaaccgactggctgaaaaatgtcggtctgaatatgccggaaacgcttgatgatttctatgaagtgctgaaagcctttaaggaaaaagatcctgacggaaacggcaaggatgatacgtacggcatggtcgtgccgaaatggatgggactcggcaacggaagcccatgggatgttctgcaaatctggttcggcgctccgaaccgctacggtgttgaaaacggaaagctgattccggattttacaacgaaggaatacatggatgcgctcacgttttttaaaaagctctatgatgagggattgatcaataaggactttgctgtcatggattctgcgaagtggaatgatccggttgtaaaaggaaaagcgggtgtcatcgttgatacaggctcaagagcgtctcaaatccaaagcgcgatggaggaggcggatgagtcgaacaaggatatcattgatatcgtcggctcgcttgagggaccgaatggcaagcgcaccttcccgacatctggttattcaggcatgatcgcgataccaaaatcaagcgtcaaaaccgaaaaagagctgaaagaggtgctgtccttcctcgataagatgaatgataaggaagcgcagattctcacgaacaacggagtgaagggccgcaattacgagctcaaggacggcgtattcacctcacttgaaaaaaacaacaaatctctcctgtatgagcatgaaggcttggcacagttcagcatgtcgattccaaaaagcgagtattacatcgaagaccagaaaaccaagctcttccagcatcgcaaggacatcataaccgaaggagaaaaaatagccgtctttaacccggctgagtcgcttgtatctgatgtctatacccaaaaaggagcccagcttgacaacatcatcctcgacgcgagaacacaatttatcattggagaaattgatgaaaaagggttcgatgatgcggtggagctttggaaaaaaagcggcggcaatgaactgatgaaggacttgaacaaattgtaccaatcgtcaaaataaaccgatgcgcctgccgttcggcgggcgccccggtatcacgaaaggagaacagatatggaaacagtgccgaagaagggagatgcacctgttctcaccgctggaaaaggcatcagctggatggctgcgctcaaacgggacaaatggctttatcttcttcttattcccggtctgctttatttcttgattttcaaatacttgccgatgtggggtgtgctgatcgcttttaaagactattcgccatatctcggcttctggaaaagcgaatgggtcggctttgattatttcaaagacttttttatgaatccggattttttccggctgctgcgcaacaccctcatgctggcgagtctggatcttttgtttgcctttcccgcgcctctcattttggccctgcttttgaatgaggtaagaaaggctgtgtataaaagatgtatccaaacctttatttacgtaccccattttgtatcatggacaattgtggtcagcatcaccttcgttttttttactgtcgatacaggtgtgatcaacaaaatgatcatgagcctgacaggtgagcagatttctttcttgtcggatgcagactggttccggccgatgattgtgatgcaaagcatttggaaagagacaggctggggaacgattctatttttggcagcgcttgctacggttgatcaagagcagtatgaagcggccatcatggacggagcggggcggttcaggagaatgtggcatattacgctgccggcgataagaagcaccattatcgttttgttgattttaagaatcggcagctttttgaatcttggctttgaacaggtgtatttgatgacgaactcactcaaccgcagtgtggctgacatcttcgacacgtatgtgtacatgatggggattacccaaggggcgtatagctacagcacggcggtcggtttgtttaaatcagttgtcgggattatcttgatttttggcgccaattacattgcgaaaaagtttgatcaggaaggattgttttagaggagggagaggtatggctgaaattcacacgatgcacaacaccaaagccggacgggtgtttgacgtctgcaacattctgtttctcggcggtgtcggcgcgattaccattttgccgtttttatatattatcgccggttcctttgcgacagaagcggaacttgcccagcggagcttctttattttcccgaaaacctttacacttgatgcttacaagtatgtgttttcgacaccgacgttccttcgaagcatgggcgtgtccatcttcatcacggtggttgggacggctgtacagctatttttcaccttcacgatggcgtatccgctggcgaagcggcatgtgaagggacggaatctgctgttgaatctggtgattttctccatgctgttttcaggcggcatgattccgacgtaccttgtcgtaaaatcacttggccttttggatacgtattgggcattgattctgccgatggcgattaatccgttcaaccttattattatcaaaaacttctttcagcagctgccgcgcgagctggaggaatcagcaaaaattgacggctgttccgaaatcggcgtcttctggcggatcgccctgccactgtcaaagccggttatagcgacctttgcgctgttttatgcggtcgggatttggaatgatttcttccacgctctcttatatatcaatgacagtgcaaaatggccgctgcaaatggtgcttcgccaagtcacgattttatcggatttaacggcgaccaatggcgatacgatgcaaaatgccgttccgccggagcagggaattaaactcgctgtcattgtcattgcaacgctgccgattttggcggtctatccatttttacaaaaacactttgcaaagtggatgctgatcggttcggtgaaaggctgagaaagggagtgtttcatatcagtacattagatcggattaagattgcctatatcggcggggggtcccaaggctgggccagaagcctgatgagtgatttgtcgattgatgaacggatgtcaggcacggtggcgctctatgatcttgattttgaagccgctcagaaaaatgaagtgatcggcaatcacagcgggaacggcagatggagatatgaggctgtttctactttgaaaaaggcgttatcagccgcggatatcgtcattatttccattttgccgggatcactggatgatatggaagtcgatgtccacttgcctgagcgctgcggtatttatcagtctgtaggtgatactgtcgggcctggagggatcatcaggggcttgcgtgctgtgccgatatttgcggaaattgcccgggcaataagagactacgcacctgaatcatgggtcattaattatacaaacccgatgtctgtctgtacaagagtgctgtataaagtgtttcccggcatcaaagcgattggctgctgccacgaggtattcgggacgcaaaagttattggcggaaatggtcacggaaaggctggggattgaggtgccgcggcgtgaggatatccgcgttaatgtgctcggcattaaccattttacatggatcacaaaagcctcttaccgccatattgacctgctgcctatattccgtgaattcagcgcgcactatggggaatcaggaggatatgagctggagggggaaagctggagggacagcgtcttttgttcggcacaccgtgttgcgtttgatttatttgaaacgtatggcgccatccctgctgcgggagacaggcatctggcagagtttcttcccggcccatacctcaaacagcctgaagtatggaaatttcatctcacacctatatcattcagaaaacaagacagagctgagaaacgacaagaaacagaacggttgatcgtgcaacaacgaggcgttgctgagaaagcttcgggagaagaaggcgtgaatatcatagtggctcttctcggattgggtgaactcgtcacaaatgtaaatatgccgaatcaaggccaggtctcaaaccttcctatacaagccattgtcgaaacaaacgcattcatcacaaggaaccgtgtccagccgattttgtccggagcgcttccgaaaggtgtggaaatgctggcggctaggcatatatccaatcaggaggcagtggcggaagcaggtttaacaaaggacactggcctcgcgtttcaagccttcctcaatgacccgcttgtcaagattgaccgcagtgatgcagagcagcttttcaatgacatgctccaatgcatcatgcaacgttgagcggagtttttccggtttagaaaggaaagcattgaccatactgatagtattatcaagaagtaggtgctatcaatatgggaaattatttaagcgttgcggtagaactggtctgcggtttaggcattttatttatcatcttaaagcttctcgggaaaacccaattttctcaaattacgccgtttgactttatctctgctttaattttaggagaattagtcggaaatgccgtttacgatcatgaaatcaaaatcaaagaaattatttttgcttcgctattgtggggcgtgctgatttatattattgaatttatcacgcaaaaaatgaaatcatcgcgaaagttcttggagggcgagccgaatatcgtcatccgcaaaggggagcttcaatataaagtattgaagaaaaataagatggacattaaccagctgcaaagccttttgaggcaagcggggagcttttcgattcaagaagtagaatatgcgattttggaaacaaacgggatggtcagtgtgcttccaaaatccgactttgacaaaccgaccaataaggatttgcaggttccttcgaagtctgtttccctgccaatcacgttaatcatagatggagagcttgtccgggataatctgaaggaagcaggtgtggatgaacagtggctgaagcaagaattgaaaaagaagaacattgataagacggaggacgtgttatttgcagaatggcataaaaataagccgctgtataccgtaacatacgaacaaagcagatcaacatgactcttagaaaaaagcttgcagcaaggcgcaagctttttattgattgtatgtcccttgtttgacagcacgtacatggtacatgctcacttcagtgctgatcagatagtcaggctttggtttgcctttgtttgctttgtggccggcgatatgcgcatcgcttttttcccattgcttccagcgatcctctgattcccagcgaatcatgacaacaacttcctcatcaccgcggcgtacgtttttctcaagcactgtcacatcaattaaaccttcttgtttttcaatgattccttcagcgctgaaacgttctatgactttatctgcaaagccttcttttaccgtcatttttctcaactgaacaaacattcgtctcactccaatcattctcacatatgaataattgtaaatgaaattcattctcattgtcaaagaaagcgcagggcggaatcgaaccgccgtgcgcaacagtttattcttttaataaaaacacatttccgtcttcgtccttaaattgaacgaaggtgccccactccatttgattgggctcaccgagaaattctacaccgtttgtcttcattttctcgtatgtaccaaagatgtcttcgcattcaaacacaatagaagccttcatttgctctgagcctttcatcatggctttcgggtaaatgactaaacgagtctcggctccttttggcgcaacctccagccagcttgcttcaggtcccattgggtggtccgctgcaatatcaaagcctaccttctctgtccaaaattgcttcgctttctgctggtcctcgacatatacagcaacagtgccaatttgtttgatcatagggaaacctccaagttgaaaagataataatactataacctgtttacggccgaagtaacataaaaaaatcagccgggaaaccggctgatttttaaaatgagcagctgacaacatcgatgtgatttgtgtctaaggcgaaataaacccagcggcgccgtgaggaatcccaataaaagccgccgacggatcttctgccaaggatgatcgggtaaaaccaaaatgagcggccattggttaaccaaacataggtaaatcggaaaaggcaaggacgaatggtgattggttcaactaacaaaacggctccttgagaaccctgcggttttgggggtttcgctggtatttgggaaggaggaggtccctgcggcgcaccgccgaagcctgggctggcaccgctgccaataccagggccggagccgccgccaaaacctggaacagcgccaccgccaataccagggccggagccgccgccagagcccggaacagcaccgctgccaatgccaggccatggatatcggtattcatattcaaaagcaggccaaggctcataaaaatgccccgcaaacatataaggatcaacataatacatgtgataacgtcctttctcattgtaaactgtacactgcagtttatgcgggcggactcttattggtgcattcgcctaaggatatgaagctggaatgctctcaaagagcagaatcatttgatttttctctagtcttattcacaattccgatttatcattttataatgaaagtgcttctattacgaaaaaggagacagaccgtgaatatcgatcaattattatatcaatatatcatagacaacactgcggatattactgagaaatggttcagtttgcgttgccagctaaaaggcgagctatattccgccagccatttaagtgaagaaacgaaaacacttttaaccgagcagcatacatttaccaatataacaatcgcaagcgcatttctggaggatcaaaccgattttcaagacaacatgacaaaatgggcggaaaacgttgcgaaaaacagggtagagcaggatgttcaagttcatgaggtcgtagaagccatatccaactctagaatctcattctgggacgcagtcgccacatttataaaagagaatcaggagatcgtgacaaatgaggatgcagaccgatggaaccgcattgtgaatcagtcgttcgataagctgattattgaattctctgagcagtaccaaaaattcatgctgatgaggctcacatctcagcaggaactgatctcagagcttggctgcccggtcatttccattgccgatggaatcgggatattgccgcttatcggctccattgatacaaaacgggcacaggtcattttagaaacagtgccggtccgctgtgtcgagagaaaaatcacaagcctcgtcgttgatctttcgggtgttccgattgtggataccatggtggctcagcaattgtacaacctgtctaaaacgcttttcttattaggcgtcaaagccgtattttcagggattcgcccggatgtggcccaaacatcgattcaattggggcttgattttagtgaatatgaaacgtacggcacgctgaagcaggcattagaaaatatgggtgtccgctgtattgttgaggaattggaagaaaacaaataggaagtttccaggcatatgattgtccgtcaccgggtgatcatatgcctttttgatttgaacagaaatcaccattgatttatcaaaaaaaacataatattataattcttataagaatactgtgaattaaaacctattcaacagggggaaggtcttttggtttcaaaatcaacgattgatccggaagtgattgaaaaaatcatcagctcgctggaaacactcgatttcggcaccgttcaaattacggttcatgattctcagattacccaaattgagaaaatagaaaagcaccgtttttcgctgaaaaggaaagaatcaaaatgataatgtaaagggcgtttgttttcattaaattctccttaaaacatatacatatttcatccaatttttatataatagacctttaagatcattttttaggaggatttttgacatgcaagctacggttcacgagagtaagcaatcgatcatgcaacgcattttgacagtctttgtctttactttgctgatcgcgactgtcggcctttttatcggccaatttgttcctgtcgctttgatgctgccgctttctattcttgaagtggtgatgattattctggccttctggatgcgcagaagaaaagcggtcgggtatgcgtttgtatatacattcgcgttcgtttccggcattaccttatttccgatcgtcagccattacgcttccatcgccggcgcctatgtcgtgcttgaagcctttggttctacatttgtcatttttgccgtcttaggcacaatcggcgcaaaaatgaagaaggatttatccttcctgtggtcatttctgctggttgcggtgctcgccctcgcagtggtagggattttcaacattttcagcccgttaaactcagcggcgatgatggcgtattccgtgatcggaaccatcgtcttttccctttacattttgtatgatttgaaccaaatcaagcaccgccacattacggaagacttgattccggttatggcgttatcgctgtacctagactttatcaacttgttcatcaacctgctccgcttcttcggcattttgagcagtgatgattaatgaaaaagcgtctgtcattggataggcgctttttgccatacatcaaaaaggcaggtggagtattggtgaaaaaacaaatgggcgcatatgtatctctggcagcagctatggcgatcgtcggcagttctgtcgttgtcggcaagctgatggtcgaacggattccggtctttctttcctcaggattgcgttttttgatcgcttctgtcgtattgctcatgctgctgttttgcattgaaaaagggtttccggctttgacgaaaaaagatgtgttcgtattactggtgcaatcattcacaggcgtgtttttgttcagtatttgcctgctgtatggggttcaatatacgacgggaacggaaagcggcattttgacaagcacaacccccatggtgatcggtattttatcctttttcctgcttagagaaaaaattgagaaaaagacgctgatcggcattttgctggcggtttgcggcgtaatggcgattaatttgtttggagccgggagccaagacgggacgccgcacgccttattcgggaacatgctgatcattgctgcagtcattggcgaagcgttgtttacattgatggccaagctgctatccccgcatatttcggcactggcgatttcgaccttcgtatcgctcttcggcttcctgttttttctcccgtttgctttgtttgaggcctcttcatttgattacagcgtgccgactgttttggattggtcgtatgtgctgtattacgcgctttttgtcactgttttggcgttttacttatggtatagcggggtgacgaaggtgccggcgggtgtatcgggcattttcacatccgttcttccggtctccgctgtcattttgtcaggcgtgatattgaaggagccatttgagtttgtgcatttcatcggcattgcatgtgtcatcggcggcatatttgttacggtcataaagaaaaaacagccggatgcgtatccggctgcagaagaaaagacgctatagcctgtccggatcggacgggttttttagtctttaaacacgctcagcctttcaaaaagatcaccaagcatcttcacgaacatgtctttttcctcgtcgctgtagttttccatgacagcggatattttgctgaaatggccgggcagaaattgctccaggcgtgctttgccttctgttgtcagttcaatgctgatttttcgtttatcctctgtgtgatgcctgcggctgacaaaaccgtctctcgccagcccgtccagcaggcctgtaatcgtcgctttcgtgacgtttgactgtttggcaagctctgtcggacttaacctatgatccttggcatcaaagagcagcatcagtattttgaattttccttctgacagccctcggccagcaaagtaatgctccatcacatgattcattttttttgaaatatcaaaaagagataaaaacaattcaagagagccggcgtcaatattggaatacgtttcggcgtgctctgttatatgcttatatttcggtaaatgttttaattccatcgcaagtagctcccgtacattcgttgtgacacgattataaaggagggaaaaccataacgcaacttggcttggagatgattgacagcttttcttgggacatagtaaggtaatatagttaggcgcctaactaatacatatagagctgaaaaggtggttattgatatgaaacatatgttaattgcaggaggcggcatcggcggcttgtcagcggccatttctctccgtaaggcagggttttccgtcaccttatgtgaagcggcttcagaaaaccgaaaaacaggtgcggggattcttcagccgcaaaacgcactggcggtgttgaaagaactgggcgtattcgaagagtgctgtaagcacggctttcaaacagaatggtttaaaacgtttgatgaacaggggaatttgctgtttcaagtcagtgaatcctttttagacgattcacttccgggacgcaataatatcctgcgcaaaacgttaaatgacattctcatgaagcatgccgaggcagtgggtgtagacatcaagtgggggaaaaaggttgtcgcttatcaagaaacagctgaatcggtcactgccgtatgtgaagatggagaaaaaatgcaggctgccattctggcgggctttgacggcattcactccgttgttcgcgatataatgctgcaaaaggagacggaaaaagagcatctcggcatgggagcgtggcgcttttatatcgaacttcctgatcacacatttgaggacgcgacattgatgtacagaagcggagacacacaaatcggggtggtgccattggcacaacacgctggctatgtcttcgtcctccagccttgcacgagcgattactgggatgaggaagatacccggtttgatagagtaaaagagattctttctggttttcgggggctggattttgtcacaaagcacatgtcaaaacagcatcctgtcatctttaacaaactggagcaggtcgccgtgcaggagccatggcataaaggccgcgttgtcatcggaggagacgccgcccacgccggcgcgccgaccctggcgcaaggagcggcaatggcgatcgaggatgccatcgtcctcgccgaagaactccaaaaccacgccgatcacgaaacagcattacaggcgtactacaaaagaagagccccacgagcgctcaaagtccagaacctatcatcggaaatcgtccgccgcgggctgaaaggagagccgggagcggaagaactgattggggagtgctatgcggtgttgagggaagggtattaaataggaaaagtccagaaagtgatttctggactttttagtcttgctctgttttattccttatccgctcaatcacctcatgcagcccctcaggcttataaaactccaccggtgaactgcctttctcaaacgaaatcgtctcggcttcaatcagcgcgacatagcgcccgtttacttttgcgagatgaatagaatcgccaaaatccgctagcaatcccttaatctctgtttctccgactttcattttcagctgggcctctggcgtgtgctcgatgatttgggcggaggcttcgatgacttgatgggtgtcgaggcgctcttggatttcccgtttttcgcttgcttcccaaatctcaatgtcgtgctcgaactgcttgagttcttcgctgttgtcttcaaatgtctcgtagacgtgctcctgtaccatgttcatgacctggtttttcatgatttccggcatcgattctccgtactcgacgaatttcagaaagtcctcaaaatagcgggcgtgcgaggcctggtggattttcagttcaccttcctcgaccattccttcctctggcatgtacgggtattggatgcttttcatgttttttgtcgtgatcgccatttcgacttttttaatgagagaagacgcgtcagagatgcgggcgaccttcggctcaaaatcacatttcataatgaagacaaatgactcgtcaaagtattttctcggcacggccgaagcgacgagaaacacgccgccgcgaaccgcgcttgtgtcaaggtacgtgcggacgaactgctcgctcagctcattgaagtcttcttttgtttccgccagacgcgcgcggttgaacatgttgtagtttgggttggaatcgagctcgtggccgggctcgacgataaaatggccgattttcgtcggcacctgctcggactgcggatggcggtctgctttccgtttaacgatttttttcagttccccgtcgagaaagtccttcagctcgctttcttcaaattcgcccgtatcaagggtctggaagtgcttgaactgcttgttcgcctgctcatctttgccttccacctgtatgacataaaaggataaaaaccgaatttcaaaatccatatataaactcaccttattcgcgtattgtacagcttctcaagtatagaaaaaacagcgatcatgcgtcaattgggagaacggaataatcatgaccatgaaagggaaatgtagtcaaatagaaggcatctcatacggaaaggaatggttcgatgaaggaaacaagcccgattcctcagccgaagacgtttgggccgctcggcaatttgcctttaatcgataaagacaagccgacgctttcgctgatcaaactggcggaagaacagggcccgatttttcaaatccatacacccgcgggcacgaccattgtagtgtccggccacgaattggtgaaagaggtttgtgatgaagaacggtttgataaaagcattgaaggcgccttggaaaaggtccgcgcgttttccggtgacggattgtttacgagctggacgcatgagcctaactggagaaaagcgcacaacattctgatgccgactttcagccagcgggccatgaaggactatcatgagaaaatggtcgatatcgctgttcagctcattcaaaaatgggcaaggctcaatccgaatgaagcagtcgatgtcccgggagatatgacccggctgacgctcgacaccattgggctatgcgggtttaactaccgctttaacagttactacagagaaacgccccacccgtttatcaacagcatggtgcgggcgcttgatgaagcgatgcatcaaatgcagcggcttgatgttcaagataagcttatggtcagaacaaagcggcaattccgccatgatattcaaacgatgttttcgttagtcgacagcattattgcagagcgcagggcgaatggagaccaggatgaaaaggatttgctcgcccgcatgctgaatgtggaagatccggaaacgggtgaaaagctcgacgacgaaaatatccgctttcaaatcattacgtttttgattgccggccatgaaacaacgagcggcctgctttcctttgcgacttactttttattgaagcatcctgacaaactgaaaaaggcgtatgaagaggtcgatcgggtgctgacggatgcagcgccgacctataaacaagtgctggagcttacatacatacggatgattttaaatgaatcactgcgcttatggccgacagctccggctttcagcctttatccaaaagaagacacagtcattggcggaaaatttccgatcacgacgaatgacagaatttctgtgctgattccgcagcttcatcgtgatcgagacgcttggggaaaggacgcagaagaatttcggccggaacggtttgagcatcaggaccaagtgcctcatcatgcgtacaaaccattcgggaatggacaacgggcctgtatcggcatgcagtttgcccttcatgaagccacacttgtgctgggcatgattttaaaatatttcacgctgattgatcatgagaattatgagcttgatatcaaacaaaccttaacacttaagccgggcgattttcacatcagggttcaaagccgtcatcaggaagccattcatgcggacgttcaggcagttgaaaaagccgcgtctgatgagcaaaaggagaaaacggaagcaaagggcgcatcggtcatcggtcttaacaaccgcccgcttctcgtgctgtacggctcagataccggcaccgcagaaggcgtcgcccgggagcttgcggatactgccagtcttcacggcgtaaggacagagacggcacctctgaacgaccggattggaaagctgccgaaagagggagcggttgtcattgtgacctcgtcttataatggaaaaccgccaagcaatgccggacagttcgtgcagtggcttcaagaaatcaaaccgggtgagcttgagggcgtccattacgcggtatttggctgcggcgaccacaactgggcgagcacgtatcaatacgtgccgagattcattgatgagcagcttgcggagaaaggcgcgactcggttttctgcgcgcggggaaggtgatgtcagcggtgattttgaagggcagcttgacgagtggaaaaaaagcatgtgggcggacgccattaaggcattcggactggagttgaatgaaaacgccgataaggaacgaagcacgctaagccttcagtttgtcagagggctgggcgagtctccgctcgctagatcgtacgaagcctctcacgcatccattgccgaaaatcgtgaactccagtccgcagacagcgatcgaagcactcgccatatcgaaattgcattgccgccggatgttgaatatcaagagggcgaccatcttggcgtattgccaaaaaacagccaaaccaatgtcagccggattctccacagattcggtctgaagggaaccgatcaagtgacattgtctgcaagcggccacagtgcggggcatctgccattgggccgtcctgtcagcctgcatgatcttctcagctacagcgtcgaggtgcaggaagcagccacaagagcgcaaatacgtgaactggcggcatttacagtgtgtccgccgcataggcgcgaattagaagaactgtcagcagagggtgtttatcaggagcaaatattgaaaaaacgaatttccatgctggatctgcttgaaaagtacgaagcgtgcgacatgccgtttgaacgatttttagagcttttacgtccgttaaaaccgagatattattcaatttcaagctctccaagagtgaatccgcggctagcatcgatcacagtcggcgtcgtgcgcggccctgcgtggagcggccgtggcgaatacaggggcgtggcttcaaatgatttagctgagcgccaagccggtgatgatctcgtgatgtttgtacgcacaccagaatctcggtttcagcttccagaagaccctgaaacgccaatcattatggtcggacctggcacgggagtcgcgccatttcgcggtttccttcaagcccgcgatgttttaaagcgggaggggaaaacgctcggtgaggctcatctctattttggatgcagaaacgatcgtgattttatataccgcgatgagcttgagcagtttgaaaaagacggaatcgtcactgtccacacagccttttcccgcaaagaaggcatgccgaaaacgtatgtccagcatgtcatggctgaccatgcagaaacgttaatatcgatccttgaccgcggaggcaggctttatgtatgcggtgacggcagcaaaatggccccggatgtggaggcggcactgcaaaaggcgtatcagtctgtccatggcaccggggagcaagaagcgcaaaactggctgagacatctgcaggataccggtatgtacgctaaggatgtctgggcagggatatagataaagaagactggagacatccagtctttcagcgtgtcggcaaaccctcgcattcgttgtcaggactgcgcttcggtgctcaatgcgaagtggatcaacggctaaattctcaggcgtcctgcctaaacgccgtcgtcatcacatcctgtgaatatccgctcctatgctcgtccttcctagacttcaagggttttcaatcacgctgaaaagatgacaaaatcctaaaatggttttcattttaggattttgtcaacaatctggaagactggagacatccagtcttttttgtcctttcgaaaaaatggtgatcgcgctaaacattgatgcatacaataacttcagtccgccggaagggcgggctgtctgcaaaacctatttttcgtttttgctagtttatgttattcttatactcggtatctatttcttttttcaaaggcacacatgacaaaagaaatcctttttttatttcggagaaaaaaatgtgaaacgaaatgaaggtttctttcgtccagtgattggtttccaaatggttgtaataaaaatgatatggtgcgtaacataaatattccggcttgccgcggtgtatttcttgttgtgtgatgccttgattttgtttggaaagaaggaattggaaggcaggatataaagagcaggtaaatatgaatgaagaacttaaagtgtttaagaaagtagaggttgccatgaagaaacttttttcttacaaacttagcttttttgtgctggctgttatactgttttgggcaaaaacgtatttatcctacaagactgagtttaatcttggggtaaaaggcacaactcaggagatcctcctgatatttaacccattctcaagcgccgtcttctttttaggactggctttgctggcgaaagggcgtaaatcagccattattatgctgattatcgatttcttgatgacatttgtgttatatgcaaatattttattctatcgtttctttgacgatttcttgacgttcccgaacattaaacagtctggaaacgttggaaacatgggagacgggattttcagtatcatggccggtcatgatattttctatttcttagatattatcattttgattgcggtattgatctggagacctgaattaaaagaatacaaaatgaaaaaacgctttgcatctttagtgatcctttctgggatcgcactgtttttcatcaacctgcactatgcggaaaaagaccgtccgcagctgctgacaagaacgtttgaccgcaattatattgtgaaatatttaggtttatacaactacaccatttatgacggtgtacagacggctcaaacagaaacgcaacgggcctatgcaagcagcgatgatttaacaagcgtcgagaattacacgacgtctcattatgcgaaaccgaacgccgagtacttcggctctgccaaaggcaaaaatatcattaaaattcacctcgaaagcttccagtcattcctgattgactacaagctaaacggtgaagaggtgacgcctttcttaaataagcttgcgcacggcggggaagatgtgacgtattttgataacttcttccatcagacaggccagggaaaaacatctgatgccgagctgacaatggataactcgatcttcggtcttcctgaaggctccgcgtttgtgacgaaaggcgaaaacacctaccagtcgcttcctgcgattttagaccagaaggaaggctatacaagcgccgtcctgcatggtgattacaaatcgttctggaaccgtgaccagatttacaaacatatcggatacgacaagttctttgacgcaagcacgtacgatatgtcggatgaaaatgtgattaacatgggacttaaggataagccgttctttactgaatcgattccaaagcttgaatctcttaaacagccgttttacgcgcatttgattacattgacaaaccattatccgtttaacttagatgaaaaagacgcgtctcttaaaaaagcgacaactggcgataacacagttgacagctacttccagacagcgcgttaccttgacgaagcgcttgagcaattcttcaaggagctgaaggaagccggcctgtatgacaactcagtcatcatgatttacggtgaccataacggtatttctgaaaaccataaccgagcgatgaaagagattcttggaaaagagatcacagattatcaaaacgcacagaaccagcgtgtgccgctgatgatccgcgttcctggcaaaaaaggcggagtgaaccatacgtatggcggcgaaattgacgtcatgccgacacttctgcacttagaaggaattgattctcagaaatacatcaactttggtactgacttattctctaaagaccacgacgatacagtggcattcagaaacggagacttcgtaacgccgaagtacacatcagtcgacaatatcatttacgatacgaagacaggtgaaaaactgaaagcgaatgaagaaacgaagaatctgaaaacaagagtgaaccagcagctgagcctttcagacagtgtcctgtacaaagacttgctgaggttccataaactaaatgatttcaaagctgttgatccgtcagactatcattacggcaaggaaaaagaaatcaaataagatgaaaaagagccttgagcgggcgcattgccttcgctcaaggctctttttttggttatacaaccaacttgaaaaaatagattccatttggtcaccaaggctggctttctctcatatcattacagtagattttgaaaccggattgaaatcggacaaattatcggggaaatgccttgatagattgtgaagatgtaccaggtttcgaactcaatattcatagagatgaggggtagagatgaaagcggtcattctctgcggcggaaaaggaacgagaatgagtgaagtcacgaatgacattcctaaaccgctcgccatgataggcggcaaaccgattctatggcatattatgaaaatttatcagtactacggagtaaacgagtttattctgcttttgggctataaaggagaaaaaatcaaggaatactttctcgactatgaatggaagcacaacagcctgacactcgacagctctacgggagaggtacagatgctgggacagcctgaaacgtggaaaattacgtttttggagactggggaagatacgctgacagccggaagaatcttgcaggcgaaagactatatcggtgatgaaacatttctgcttacctatggggacgggctggccaatatcaatcttttccatctcatcagctatcatcagacaaaaggtgctgccgcgactgtcaccggcattgacaaagtctcgcagtttggcaccttgacggttgaggacggcatggcgaaaacattttctgagaagacatcaagtgacggaatcatcaacggcggattcttcgttctcagtccaaaggttttcgagtatttgccgaaggacgggaacgcgatgttcgaagatgaaccgctgaagaaccttgccaaagacggggagcttgctgtgtaccgccattacggattttggacggccatcgatacgtataaaaatctcttagaagtcaacaaaatgtggaatcaaggacaacaagtatggaaggtatggtgaatcgatttgagtttctggaaaaataaaaacgtatttgtcacgggatccacaggtcttttaggaagctatttggtgaaagagctgatcgatcagggcgcaaacgttacggggcttgtcagggatcatgtgcctcaatccaatctttatcagggagaacatatcaagaaaatgaatatcgtgcggggctctcttgaggacttggctgtgattgaacgcgcgcttggcgagtatgagatcgacactgtctttcatctcgctgcacaagcgattgtcggcgtagcaaaccgcaacccgatttctacctttgaagcgaatatcctcggcacctggaatattctcgaagcctgccgcaagcatccgttaattaagcgggtcattgtcgcttcaagtgataaagcttacggcgatcaagaaaaccttccatacgatgaaaacatgccgctgcaaggcaagcacccgtacgacgtctcaaaaagctgcgcagatctgatcagccacacctattttcacacgtacgggcttccggtctgcattacgcgctgcggaaacttatacggcggcggagatttgaacttcaaccgcatcattcctcagacgattcagcttgtgctgaacggggaagcgccggaaatccgaagcgacggcacatttgtacgggactacttctatattgaagacgccgttcaggcttatctgcttcttgcagaaaaaatggaagaaaacaatcttgccggagaggcctttaacttcagcaatgagatccagctgaccgtacttgaactggtagagaaaatattaaagaaaatgaacagtaatctgaaacctaaggtgctgaatcagggaagcaatgaaatcaaacatcaatatttatccgcggaaaaagcaagaaagctgctgaattggacaccggcctacactattgatgagggacttgaaaaaacgattgagtggtatacggaattcttcaaaaagtaatgtgaaacgaggtgaacaagactgtgaccagcgcgtattgcaccgttttatcaaaaggaagattatatcaggcagtcgctttgtttaagtcgttagagcaagttgatcaagacagtcccatttttatactttgcatggatgaagatacgcaccgcgtgttacagaagctgaagatgaagcagctgaaccttgtgccggtggccgctcttgaaaatgaattgctgctgaagctgaaggaaactagagatcaaagtgagtattgctggacgatgaagccgatctttctgcaagctgtgctgaacagcaatcccgagctggagcgcgtgacgtatattgacggggacctctttttctatgcagatccatcgccgatttttgaaaaccagccggactgctcggtgctgctttcacggggggatattgtaatcccttcttttgagaaagagcagattgacatgctgcagcgtcttttaggcagatataattccgggtttatcagcttcaagcatgatgatgcaggcacggattgcttggagtggtggaaggaacgctgtcttgaggaatgcaaaaatgcaccgggtgaagggaaattcggtgatcagggctatttggattatatgtctgagctgtttccgaatgtgtgtgacattacaacacccggcgtgaacatcggccattggaattatggacagcatacgttttcctggaaagatggccggatcgtgctggaggatggcagtccgctgatcttttatcatttcagcggataccgaatcgtcagcatcaatgaaatcaaacagattcatgaaacaacccgcacagatctgccgtttgtgcatgaactgtatcaagagacactgccgcatatcattcagcacatgaaaacgttagaccctgaatttaacggttttgcttcaaaagatgacaacaaataaatgagtaaatacaggaagtgaaaatgaagtgaaagcaagcgttattattcctgcatataattcaaaggagcgtctttacaacagccttctgtcattaaaccagcaggagtgcgatgaagaattcgaagtcattgtagcggacaatggctctgaggacgggacgctctcgatgcttgagtcatttcaagctgattttccgctgatctttacacggattaaagaaaacaggggcattgcgtacggacgaaatcaggcgcttcgcaatgccagaggagacatcctgattttccatgacagcgatatgcttgcggcaaaggaccttgtggcaaaacatattaaagcccatgagaacgaagagaatctcgtcgtgtgcgggttgttttggaaacggatctacagtttttactatgaacggtttgaagaagaacataaggaacagctcgcaaagctcacaggtgaaatgccgaagaaagacaaacaaaagctgctggaggaagcggacatcaaaaacggaagctttcttgataaaagctttgacctcgataccgactttatagacgtgctcaagaagattttagatgagtacggcgatgacttgaaaggctatcatatgccatggcgcttttttatcacgaataattcctctgtgaaacgcaagcatgtggttgacctcggtttatttgacgaaggcattgtgcggtacgggtttgaggattatgacctcgggatcaggcttcatcaggccggattgaccttcaggcttcgccgtgatattgtcagtgttcatcaggaacatccaagcaattgtaagtctgtagacgatattcgggcaaacattgcctatatgtgcgataaatacaataacatccgctccttagacgttcatctcgcttttaatgggccgttcccgcctgacatgacgaacagaatcatggctgatattcaaaagctgctggaatcacagaaatatgatatgctgctgaatctgtttcttgagcttctgcatgttgttaaagagcgcaacattgatccggattggcgaaagaaatccccaagggtgacggcgaaaagctttgatttacaaactgtccgcaagcttctgcctaaggcgaagaaaaagctaggcgtgaacgattttgccaacgcactgtatgcgcttgtcaacgatttgctgcacgtggatcttagatcattggatgtggtataagtgagtacatttcatttttcaacgatagtgtcaaggacacatatctttaagctcatgcctatgattcattctctccatgagcattgcgatgattttcatttatatgtgctgtgtgtcgaccagaaagcgtatgaattgcttcagcacgtgccatgggagcatgtaacctttgtgcagctgcatgaaatggaagacccggagctgctgaaagcgaaaagcaacagaacgtttcatgaatattgctggacgttaaagcccgcctttttgtttcatgtgatgagcaagtgggatgacgctgaatactttgcccatatggatacggatctatttttcttttctgatccggcacgtatttttgcagaaaacccaacggcgtctctgtatttgactgatcatcgtaattcgccgcgcttcatgtcctactacgaccgaaccggacgctttaatacaggctttgtcggcgccggtaatacaaaggaagcatatgaagcggtgtggcagtggagacaggactgtattgaattttgcacggtcgaaatggatacggaacgaaagacatatggtgatcaaagatatgtggagaaatggccggagcagtttaaaggtgttcatgttgtcaaatccataggagccaatacagcgctttggaatatcgaaaactataaggtcgggcaaaaggacggccgcgtgtatatagatgaaacgccgctgattttctatcatttctctgggtttacgctggtgacagaaaaagagtttaatctttgctggtactaccggattgaagacgaagcgacaattaagatgatttatatgccctatatattaaatctgaaaagatggattgatgaaatacagtcggcgtttccggactttgcggatggctttatcccgaagcacgcagtgcctgacactcattttatccagctggattaaaaaaccccctgccgcctggcaggggttttttcagctatgccattctctcagcttctggtcacttggcaataggaaggcaaggatgccgaggacagggagaaaggcaatggcgatcatcgtcggggtcagtcccgcggcatcaatcagagcgcccagcgccacagcgccgattgcgcccatcccgaaggcaagcccgacggttaaaccggacattgtgccgatttttccaggaactagctcctgtgcgtagacgaccgttacagaaaagctcgacatcagaaccaagccaatcaatgcgagcacgccgtaggcgagaaccgggccggcaaatggcagcacaatcgccagcggcgccgagcataacagcgaaccgaggataacgaagcgttttccaaaacggtctgcaagcgggccgccgagaaacgtgccgatcgcgccgaacagcaagaagacaaaaatatagctttgtgcctgctgaatgcttacgtgataggtatccatcgcgtaaaacgtgtaaaagttaccgatcgcactcgtataccaagaacgagcaaaaatgagaaatataataataataagagcagatacaacagatttggtgatggccgtgttttcagccgttttcttttgcttgcctgatttctgggcaaggctgccgagacgtgaggcgtaccatttcgcaatatacatgagaaacataacagcaagcgcggcgacaagcgtgaaccaaacagcgccgaattgcccgagcggcacaaggatcagcgcggtgatcagcggtgccatcgcctggcctgagtttccgcccacctgataaatcgattgggcgagcccgcgttttgtgccggcggccatatacgccacacgggagccctccggatggaaaatggccgagcctaatccaatgaaaaacacacagcataagatcgttatgaatgacggggcaaatgcaaggcccaaaatgccaagcatgctggcggtcaaaccgactggcagcgcatacggccgcggccgtttatcggtataccagccgacaacaggctgcatgacggatgacaccatgtttaatgtgaaagcaatgatgccgagctgtgtaaacgtcaggctcatggagcgttccaaaatagggaacatggccggaatcacagcctgaagcgaatcgttgagcatatggcaaattccgataataatcaaaatcggatacaccgtggtgcctggtttttgaactgttttttcttttaacggggcggcgatagccattgagtctcctccttacatatataaccaaagcataccaccatattattcataaggtgaagaatttatcaagaggaaaaaagattcttatgaaagaaataccgtcagcctgattagcagctgacggtattttcgatattcaaaatgtgatatagctcttcaagcttacgaatctcataggttggtatgatctctggcacattcggcttcatgtcagggttcatccagcaagtatcaagcccggcgagctgtccgcctttgatatcagcagttagtgaatccccgatgattaatgtgtgctctgctgaaaattgaggaatccgttcaaacacgtaattgaaatattccttcatcggcttttggaagccggtgtcttcagaaacgaaaatgtccttgaagaatggaaataatcctgaatcacggagacgcttatattgtgtgtgagacacgccgtttgtcacgatgtacaaatcaaactgttgctgcagatttgagatgagatcaaatgcaccgtcaataagctgatgtccttcttcaagaaagcggcggtatttttgctcaagcaaagcgccgtccgcttcgtaaccgtactccttgagcaaagcggaaaaacgtgtgtttacgacttcatcccgtgtcatcttaccttcttcaaaggctctccagagaccttgattgatggttttatactgcgccttcatgtcatttgttaaaggaatgttctgatcttcaaacagcaaacgcagggctaaagcttctgccgcttgaaaatcaaggatggtatcatctacatcaaataataaagtgcggtatcgcttcatctgtgtgtctccctttctcatatgtattcaaagtatagcacataaaaaaaggaaaaagccggcgggtgaggcaccgccggctgaaaagagattatttgtttaataagctgtgttttctcgaatataggaagtaaaccagcgttccgacagcgatccagatgacaaatgaaagccatgtgacgccgggaaggctgtacatgaaccaaaggcagatgcctgcgctgataatcggcacaaccggaacgaatggcactctgaaggacgctttgatttcaggatgtttctttcttaacacaatgacagcaatggaaatgaccgtaaacgcggcaagtgttcccatgttcaccagatgggccagcgttccgaggttaataaagccggcgattcccgctgcaacgatccctgtcagccatgtgttgcggaacggggttttaaatgacggatgaacctttgcgaacaatccaggcagaaggccgtctctgctcatggcaaatgtcaagcggacctgtgcgtacagcaaagcgagcatcaccgtcgtaatcccgataatcgcaccgacagaaataattccggcaacagcgtcctgtccgacgaatttcagcgcaaaggatacaggatctccgacattcaatttggcataaggcatcatgcctgtcagcacaagcgataccgcgatgtacagaaccgtacagacggctagagctgaaataatgccgacgggcatgtttttttgcggatttttcacttcctctgatgcgttagaaaccgcgtcaaacccaaggtacgcgaagaatacagtggcagcgctaagtatgacgcctttcatcccgaatggcataaaaggagaccagttatccggtttcacatagccgatgccgacaataatgaacaataatatgatcgcgattttcatcagtacgatgacgttgttaaagcgtgtgctttccttgacgcctctgctgacaatcgcagtgatgaggagaatgatcaccgcagccggaaggttaaatacggcgcccgccgtgcttcccggcgctcctgtcagtgcagccggaatatgaagattgaagccggcaagcagtgattgaaagtatgaagaccagccggtggcaaccgccgacagtgcaatgacatattcaagcatgagatcccatccgatcaaaaaggcgagcagctctccaagtgtcacgtatgagtatgagtacacgcttcccgaaatcggaatggaagacgaaaactcagcataacagaaagcagccagcgcacaggcgagccccgctaaaataaacgatatgatgagggcgggacctgcaccggtcgctgccactgttcctgtaatgacaaaaatccctgtaccgatgacacaaccgataccgagcaaggttaaatcaaatgcgcttaacgtacgggcaaggctttttgacttgctctgcgcactcaatgtttcaagcggtttttttctaaataatgaactcatcaaaagttcctcctagaaatattcaaaatattctaatcattatatgcagttcttgttgtattatattgtcgaaatttgacgtagtcaataaaatatttttctgctttaaatgatagaagcgaaacagcgttgtcgtatcataggatagtaatttttactaatcgtatattcaattttatgcaagatgaaccgatagaaaaaatagattcgcccatattttgatttgcggttataaaggagatgctgaccatgtttcaatatgaagagttgaataaacagtttatcggcgggaaatggcaggagggcagcagcccaaatgtattggaaaacaaaaatccttatactcaaaaaacattcacaacattccgtaaagcgactgctgacgatgtagatgaagcgtatcgggcagcggcgctggcaaagaaaaaatgggatgcggtcaacccgttcgagaaaagaaccattttagaaaaagccgtcacgtatattgaagaaaatgaagaagccattatttatttgattatggaggagctaggcggtacaaggctcaaagcagcttttgaaatcggtcttgtcaaaaacatcataaaagaagcggcaacgttcccaatccgcatggaggggaaaattcttccgtcaacaatagatggcaaggaaaacagattatatcgcgtgccggcaggcgttgtcggtgtcatcagtccgtttaacttcccattctttttatctatgaaatcagtggcgcctgcactcggagccggcaatggcgttgtgctaaagccgcatgaggaaacgccgatttgcggcggaacgctgattgcgaaaatttttgagaacgcgggaattccagcggggctgctgaatgttgttgtcacagacattgctgaaatcggcgacagcttcgttgagcatccagtgccgcggatcatctcatttaccggttctacgaaagtcggcagctacatcggacagcttgcgatgaagcattttaaaaagccgcttcttgagcttggcgggaacagcgccttcatcgtacttgaggatgcagatatagaatatgcggtcaatgcggcggtgttcagccgatttacacatcaagggcagatttgcatgtcagccaaccgcgtgcttgttcattcttctatttatgacaagttccttgagctgtaccaggcaaaagtggaatcgctgaaagtcggcgacccaatggaccctgatacgattatcgggccattaatcaacagcagacagacggacgggctgatgaagactgtagagcaagcaattgaagaaggcgctgtaccagtgaagcttggcggatttaacgggacgatcgtggaaccgacgatcttaaaagacgtcaaaccgttcatgagcattgccaaggaagagctgttcggaccagtcgtctcctttatgaagtttgattcagaagacgaagcggtggatatcgcaaacgaaaccccgtttggcttgagcggtgccgtacatacgtcaaatcttgagcgcggcgtggcttttgcgaaacgcattgaaacaggcatgattcacgtcaatgacacgaccatcaatgatgaaccgaatgtagccttcggcggtgaaaagcaatcaggcctcggccgtttaaacggtgagtggagcctcgaagaatttacaacgctgaaatggatctcggtccagcacgaaaaacgcagcttcccttattaatgaaaaggagtgaatggaattgaccataaatacggaaaaagaaaccgcagatattctggacgcatttatcaaagtagccccttatttaaacagcctggttcaggatgatattacaatcggcatttatgatacggaaaaactgctcgtgaatataccggccaaaaccttttcgctgaacgtaaaagccggcgatccgctgcaggaaggggatatcatcacagatgccatccgcagcaatcagaagaagacgagcatggttccgaaagaattgttcggcttcccattgatcgcgcgtgccatcccgctgcacgacgagaatggaagagtcattggaggcgtcggcctcggaacgagccttgaggagtcgtcaaagctgcatgatgtcgcggaaagcttatcagctgttgttgaacaaacagccgcggctatttccgacatttctgaatcaattaacgggttttcaactcaaatgtcgggcatttcctctcaggcgaaaaaagtaagcgaaagcgccggtgaaatcgccgatatttcagtaactgttaaaggcatctcggaccaaagcaatctgctcggcttgaacgccgcgatcgaagcggcaagagcaggggagtccggaaaaggattctctgtcgtcgcagatgagatcagaaagctagcgacgcattcaaaagaaaatgtcggccaaattgaccagattacgaaaaaaatccacagcctgctgaaagggctggaggaatccattgagtcgattaaccagcatacagacggacaagccgctgctgttgaacaaatttccgccacgatgcaggagatttcaggaagcgcgcagcatcttgcgaaaatggccgaaaaagcgcttgaggaagagtaagagaccggggacaaacatccccggtctttttcttatcctgcatttccatgaaattcgtctgacgttttactagttttattccagcggctgatttaaaatgtacacatgaacttacgtgaggattgataggaaccatgagcatattaaaagcggaaaatctttataaaacatacggagataaaacattatttgaccatatctcctttcatattgaagagaatgagagaatcggattaatcgggccgaacggaacaggaaaatcaacgctgttgaaagtgattgccggcttggaatctatcgaagaaggagaaatcacgaaatccggaagcgtgcaggtcgaatttcttcatcaagacccggagctgcctgcggggcaaacagtgctggagcatatctattccggtgaatcggctgtgatgaaaaccttgcgtgaatatgaaaaagcgctgtatgaactggggaaagatcccgaaaatgaacagcgccagaaacacctgctggcagcacaagcgaaaatggacgcgaacaatgcatgggatgcaaacaccttggcaaaaaccgtattgtctaagctgggcgtcaacgacgtaacaaaaccggtcaatgagctctcaggcggccagaaaaaacgggtggccattgccaaaaacttaattcagcccgctgatttgctcattttggacgagccgacaaaccatttggataatgaaacgattgagtggcttgaagggtatttaagccaatatcccggcgccgtcatgctggtgacgcacgatagatatttcttaaaccgtgtcaccaaccgcatttatgagcttgaaagaggcagcctctacacttacaaaggcaactatgaagtgtttttagaaaaacgcgcggaacgggaagcgcaggctgagcaaaaggaaacgaagcggcaaaacctgctgcgccgcgaactggcttggctcagacgaggagcgaaagcccgctccacaaaacaaaaagcgagaattgaccgggtagagacgcttaaagagcagacaggccctcagtcatcaggttcactcgattttgccattggctcgcaccgtctcggaaaacaggttattgaagcggagaacgtcatgatcgcttatgacggccgcatgctcgtcgaccgttttaatgaacttgtcataccaggtgaacggatcgggatcatcgggccgaacggcatcgggaaaacaacgctgttaaatgcccttgccggccgtcatacgccggacggaggcgatattacgatcggacagacggtcagaatcggctactatactcaggatcatagtgaaatgaacggtgagttaaaagtcattgactatataaaagaaacggcggaggtcgtaaaaacggcagatggcgatatgattacagctgaacaaatgctcgagcgtttcctcttcccgcgttcgatgcagcagacgtatatccgcaagctgtccggcggggaaaaacgccgtttatacttgcttcaggttctcatgcaggagccgaatgtcctgtttctcgatgagccgacgaacgatttggatactgaaacattaagcgttcttgaggattatattgaccagttcccaggcgtcgtcatcaccgtatcccatgaccgctatttccttgaccgcgtcgtcgaccgtttgattgtatttgaaggaaatggtgtcatttcccgctttcaaggctcctatagcgactatatggaggagtcaaaagcgaaaaaagcggccccaaaaccggcagctgaggaaaaaacggctgaagccgagccgaagaaaaaacggaaaaagctttcttacaaagaccagttggaatgggacggcatcgaagataaaattgcccagctggaagaaaagcatgaacagcttgaagctgacatcgccgcagcaggcagtgattttggcaaaatccaagagctgatggccgagcaggcgaaaacggcggaagagcttgaggctgcgatggaccgctggacagaattgtccctcatgatcgaagaactggaaagctaaaaagcgtggccgcagcaggccgcgctttttttcacataatggacaaaaacgaaccggcctgcttatgttaggataaagttgtgtgtcagcggcacatggaaaactaacggagatgatgaagtatgacatgggcgatcgtgatgttaattctcatgagtctggtgaaaatcgtattaacctgtcttcctacaggcgtcatagaatggctgctcggcaaatttgaagtgcacgccaagctgagtgacgaaaatgcgagtctctctctagatggaaaacgcctcgagggtgcagagaagcagaaagtgattgatcaatttaacgaagctatcttcctggaaaaatattatatctatccaggtgatgaagagcgttatttacatccggaaaacggcggcacgcctctggtgatagatacaaaaaaaggaaaaaaagacgtgaagctgttcgtgtaccgctacgacgaccatatcgacgtcgtgaaacagtacaagaagaaagtgatcgcgtatcgagtgctttctgaaagccttcaaaaagagtctctgtcagtggcgggaagtttagcttaaacaggaaagtgaaagacgggtgctgtatgctgctcgtcttttttattgttttttaaaacttaacgtttacgttaaggttcaaaaggtgtataatggtaacagaaacggcgaagggggatttaccttggaatggatgaagattgatcaagtggccaaaagaagcgggctgacaaagcggaccatccggttttatgaagaaatcggcttgattccggcgccgaaacggacagacggcggtgtaaggctttattcagaggatgatatggaggagcttgagaaagtcatcagcacaaaagaggtgctcggtttttcccttcaggagcttcagcatttcatggaaaccagccgccagctagagttaaacaaagaggggtatttgttgtcactggatcctaaggaacggaaagaaaaactggaggaaattcaggaaaccctgaatcaccagctggatttgattgatgagaaaatccgcacattccaaagctttaaagaacgcctgcagggcatgaaaaataaagcggaacgcgccattcaatcaatcgaatgaaaagtttgttaaacgctatttttgtagcgtttcttttaatggaataaagatggaggttaggtcaaatggataagacaacacaagtgaatcagaaaacgggtttgctcagccagccaaaagcggtatgggctgtcgcgtttgcctgtgtgatttcctttatgggaatcgggctggtcgatccaattcttccggccattgccgcacaactacatgcttcacctagtgaagtatcactcttgtttacaagttatttgcttgtaaccggatttatgatgtttttctcaggagccatttccagccgcatcggcgcgaaatggacattaattctcggacttatttttattattgtgtttgcggggcttggcggcagctcaagctcaatcgctcagttagtcggctatcgcggcggctggggattagggaatgctttgtttatttcaacagcgcttgcggtcatcgtcggcgtgtcagtcggcggcagcgcccaagcgattattttgtatgaggccgcgctcggtctcgggatttctgtcgggccgcttgcaggcggagagctcggaagcatttcatggcgcgcaccgttttttggagtatctgtcctgatgtttattgcgttaatcgcgatttctttcatgcttccgaagctgccgaaaccggcgaaacgcgtcggtgtgtttgatgcgatgaaggcactcaaatataaaggcctgctgacaatggcggtatcggcattcctatacaactttggattttttattttgctagcttattctccgttcgtactggatttagatgaacacggtcttggatatgtcttcttcggctggggccttctgctggcgattacgtcagtctttacggcgccgctcgtgcacaaagcgctgggcacagtgcgttcgctcgtcgttctctttatcgcctttgcggccattctcgttattatggggatctggacagaccatcagactttgattattacatgtatcgttgtcgctggtgctgtcctcggtatggtgaatacgatcatgacaaccgctgtgatgggttctgcgccggttgaacgttcaatcgcgtcttcagcctacagctcagtccgcttcatcggcggcgcgctcgccccgtggattgcaggaatgctgtcagaacactttactgcaagcacaccatatacagtaggcggaatcgtcgtttttgtcggcatgcttgtccttctcatgggacgtaaacatcttgctggaattaaggcggggcattaataacgaaagacactgcacagatgcagtgtctttttttaatcgtggaatctccccattactaccgtattgtagtgatttccgtcagaaagcaatttctccttttttaagattccttctgcttcaaatacgtatgtttttatagtgaaatggctctttaatttgtttccaggatattcagtgagatttttttaattccgttggcatccgcttcggtcaggcattgatgcggctgggatttatcttgcagaagctgagaatgtgtccgttcatttacgattgccatttcaagtgatggttcatgctgtagagggaacgtttgccatggataaggcaaagcctgacgaatatgatcataaatgtttagaaacgctctatcaatacatacacagcgtcatgaaaaacagcttttctcggtcgagtggtttaccgcttgggcagatgaggaggattttgagctgtctgccaaaaaagagctgacccttgatgaattcacatctccattgcagctcattttaaaagacagagagcttttgagaatcgttaagaataaacggcagtaaaaaacccgcccttcagcaggcgggtttttttataaattaaagcactttcgtcgtccaagactcgcagttccatgtttctgtcgcgatatccatataaaagtctggctcgtgggaaatgagcagaatggagcctttatattctttcagagcgcgcttgagctcttccttggcatcgacatccaagtggtttgtcggctcatcgagcaccagcaggtttgtttctgagttgattagcttgcacaatctgactttcgctttttcgcctccgcttaatacggagacgcggctttcgatatgctttgtcgtcagcccgcattttgccagagcggcacggatttcatactgcgtataagaagggaattcgctccatacttcttcgatgcacgtattgttgtttgtttccttgacctcttgctcgaaatagccggtatagatgtgctcaccgcgttcaacagagccttcgagcggctggatttcaccaagcaaacttttcagcaatgtcgtttttccgatcccattcgcgccgtaaagggcaattttttggccgcgctccatgcggaggttgagcggacgggacagcggggaatcgtaaccgatcacgagatccttcgtttcaaaaatcagcttgcctgacgttctcgccggcttaaagtggaattccggctttggcttttctgccgcaagctcgatcatatccatcttatcgagtttcttttggcgggacatcgccatgtttctcgtgctgacacgcgctttgttgcgggcgacgaaatccttcagctccgcgacttcctgctgctgctttttgtaggccgcttcaagctgctgttttttcacctcgtagacttccataaactgatggtagtcgccgacataacgtgtcagctcttgattttcaacgtgataaatcaggttgatgacactattcaagaacggaatatcgtgggaaatcaggatgaacgcgttctcgtattcctgcaggtagcgtttcagccattcaatatgctgttcatcaagatagttggtcggctcatcgagaagcagaatttccggcttttcaaggagaagcttagcgagaaggacctttgtgcgctgtccgccgctcaaatcggtgacatctcgctctaaaccgatatcgctcaaaccgagaccgcgggcgatttcttccaccttggaatcaatgacataaaaatcattgtttgtcagcgcgtcttgaatgacgccgacttcttcaagcagcttctcgagctcgtcgggatcagcctcgcccattttgttgtaaatctcgttcatttcctcttccatcgcaaataaataatggaatgcgtctttcaggacgtctcgaatggattttcctttttccagcacggtatgctgatcaaggtatccgacacggacgttttttgaccactcgacttttccctcatcaggttcaagctttccggtaataatattcatgaaggttgattttccttcaccgtttgcgccgatcaaaccgacgtgctcgccttttaacaggcggaaggaaacgttattaaaaatggcccggtccccgaaaccgtggcttaaatcctttacagataaaatactcatgtttacacctctatcgttatcaaacacgcacaatcggcgtgtaatattcactcttttgattataaaggaggattcggaatgttgaaaggtataggaaagaaaaagaaaaattgcgttccgggcgaggttttgagatactatggaatagatttcaggaattgaggagaacaaaatgacgcaaacttggccatttttacataatgcacaatcatttatacaagagaattggaatgcttccggctttcaaacgccaacccctgttcaagagcaggcagcccagctgatcatggacggaaaggacgtcattgcagaatcgccgacaggtacagggaagacgctggcgtatgcgctgccggtcttggagcggatcaaaccagagcaaaagcatccgcaggctgtgattttagcgccttcccgtgagctggtcatgcagatttttcaggtgattcaggattggaaagcgggctcagagctgcgcgcggcttccttaatcggcggggcgaatgtgaagaagcaggtcgaaaagctgaagaaacatccgcatatcatcgtcggcacgccaggcagggtatttgaactgattaaagcaaagaaactcaaaatgcatgaagtgaaaacgattgtacttgatgaagcggatcagcttatcctgccggagcatcgcgaaacgatcaaacaaattattaaaacgacattaagagaccgccagcttctatgtttttccgcgacactcaaaaaggaaacagaggatgtgctccgcgaattggcgcaagagcctgaggtgttgaaggtacagcgaagcaaggcggaggcagggaaagtgaaacatcaatacctgatttgcgaccagcgcgacaaagtgaagctgctgcaaaagctgtcaaggcttgaaggcatgcaggcactcgtatttgtgagagacattggcaacctgagtgtatatgcggaaaaactggcatatcaccacgttgaactcggcgttttgcacagtgaagcgaaaaaaatggagcgggcaaaaatcattgccgcattcgaagacggagagtttcctcttttattggcgactgacattgccgcacgcggtttagacattgaaaacctgccatacgtgattcatgctgatattccagatgaagatggctatgtccacagatcaggacgaacaggccgggccggaaaagaaggcaacgtgctgagccttgtgacaaaattggaggaatctaagctgaaaaaaatggcgaagaagcttggtgttgagctgagtgaagctgtgtatgcaggcggaaaactgaagacgaaataaaaagaagggcgaaaagccctttttttgttgtaaaataatagaaaaagtttcgcgcagggggtgggaaggtggtttcaatagacaggtttcaagcagtgaaggagtcagagctgaaaattcttgaaagctggtttgagaatgaggataccagacggagaatggatgggatgctgccattagatgaatggtatgcacgagtaaataaagataaacacgatactgtcatcatggcgtatgatggacagctgccggcagggatggtcgttattgagttcggggagaagcggacatatattggattgatcgtcaatcctttgtaccggcttcaagggtacggaaaacggatattgcaaaagctgatgaccgaacctgattttactagcgtgcgggaatgggtggcatgcattgaagaagacaatcgaatcagtttagcttgctttcaagcagcaggattcactttggaagatacagaacctgatgaagatggttttcttacgctgattcttcgcagctgatctcatcgaaacacaaaaggagggcaaaaagccctcccgttttcatcttcattcagctcggatcactgaccttgatcagctgtttccctttattttctcccttaaataaaccgagaaacgcgtcaggaatgttttcgaagccttctgtgatggtttcctcgtaatggagtttaccagccttcagccattcggccagctgttttgctccctcagaaaaacgatcggagtagtcgcttacgataaagccttgcatcagcgacttcgttttaatgagttttgattggacacgagggcccatgtcatctgcttcgctttctgcgttataggaagaaatggcgccgcacaccggaatgcgggcaaattcattgagcagattcatcaccgcgtctgaaatcggtccgccgacattgtcaaaatacacatcgacaccgtctggacaagcgttttgaagcgctttttggatatcatccgctgttttgtaattgatggcttcgtcaaactgaagctcctgttttaaatagtcgattttttcatcagaacccgcgataccgacaactcgcgcgcctttgattttggcaatttgcccgactgttgaaccgacggctccggcagctccggagacaaccacggtttcgccttccttcgggcgtccgatgtccagcaatccgaagtatgctgttaagccggtcattcccaaaatgccgagataggccgaagcgggagcaaggcttgtatcaatttttcgcaaggcagactcgctcacagcggaaaattcctgccagctgagatttccgatgacgatatcgccttttttcagatgattcccgtctgacacaacttcagcgataaccccgccagaaagcgcttcatccaaggcgaacggctcaacatatgacttcgtatcctgcatacggccgcgcatataagggtcaaccgaaacataaagcgttttgacaagcacttccccttgcttgggttcaggaaccggaatggtttcaaagcgaaagtcttcatgaacaggaataccttgtggacgtcttgctaattgaatttgctgctgagatgctgtcattttcatcctcctatcacttggttgacaccactgtaacatggacaggagaggaaatacaaaaggtaagctggcatacaaaaaaggagagggggctcctctccttttcatttcgcccgtaatttcgggcacagtcccgtcggcaggcacattggcttctggtcgatcgggcttctcatgatgcagcattccaagccgaagacttcacggaaaaatggctgggtgaacacatcttccggtgttccggcgttgtatatttttccgtccagcacactgattagatagtcagcgtattgagcggcttggtttaaatcatggagcaccatgacaacggtgcggccatggtcgcggttcagctttttcagcagttcaagcacttcaatctgatgtgagatgtctaaatacgtggtcggctcatcaagcaaaagcaaatcagtgccttgcgcaagtgccatggaaatccaggctctttgtctttggccgcctgagagggcatcaagtgtccgatccttcagttcaatcatgcccgttgcttccagcgcccactctaccatgtcatgatcctcttgggtatgcttggataacagctttttgtgaggatgtctgccaaaatagcataactcctctaccgtcaatccttcaggggcctgaggagattgtggaagaatggccagtttttttgcgacttcttttgatggctggcggtggatgtcttttccttctagtagcactgtaccgcttttcggggccatcagcctggcgagcgatttgaggattgttgatttaccgcagccattagcgccgatgagcgcagtgatttttccttcttctatctttaagtcgactccgtcaataatcactgtactgtcatatgaaagagtgagctggtctgcagccagttttcccatggtatcctctccctactgtttcctcgcttcgaatttcaataaatataagaaataaggcgcgccgatcacggctgtcagtattccggcaggtatttcaaccggaggcatgatgccgcgccctaacgtatctgcaattaataatataatagcaccaatcaatgccgatgcaggcagtaaatatttagctttttctccggtaagccgtctggcgatatgcggagcaagcaagccgataaaaccgattgagccgacgacggctacacagcttcccgccagcgccaccgcggtgaaaatcaggatgaatctcagccggtttgcgttttctccgagaccctgtgcaagctcatccccgagtgacataagatccagcttcggtatgagtatgcagacgatcggaaaaagaatcaaaagccatggcgcaagcaggttgacttcttcccagtttcttccccagaggcttcctgtcagccaaatgagtgcagcattcacgtcgcctggaaacttgaccatcatatattgcattccggcgtggcagaccgcgcctaaagcaatgcctgataaagccagtgaagagggctgaatgctcttttttcgggctatcattaataatagtacagcaataatggcggctccggcaaatgcggagaacggaagcacgtataccggcgactcaggaaagatgagaatcacagccatcgccgcaagtccggagccttttgaaatgccgacaacgtccggggaagcgagtggatttcggatcacaccctgtaaaatcgctccggcagcggcaagcccagcaccggccaaaatcgctaatataatgcggggaaggcgatattgctggatgataaattcaaaggaatgatccagtcccagcagattcgtcactaccgcatcaggtgaaatgtataatgcaccgattccaatgctgatgacggacagaacgattaaaatcacggccaatatgagtatcgccagtaaggggcgtttttgttttctggttgttttcttcatttcagatgtcgccctttccttgccaaatataagaaaaacggcgttccgataatcgcggtgacaatgccgaccggtgattcataaggaaatgcaatccatctggccagtacatctgcgtacaccagcaaaatggcaccgaacagtgccgaaaacggaagcacgtattgataatgttctccgatcagcttgcggacaatatgcgggacgagcagcccgacaaagccaatcggcccggcgacggctacggaagcgccggaaaggattaaaataatcaaactgatcagaatccggatgccgttcatattttgtccaagcccttttgctgtttcgtctccgagaccgagaacagaaacagaaccggaaaatacgagggcaagcccgatgccaatgacagaaaacggagcgatggttatgacgtcctgccagttgctgccgtcgattgcgcctgtcatccagtacagaacatcctcacctgactcatttaaaataatgatggcctgtgtcatagaggagaggaacaaatgcacggccattcctgacagcgccagcttaacaggtgtcattccgccggatgaggcaatcatatacacaatcgcgccgcctgctgccgcacccgcaaaagcgaatataacagatgaatagggcgatgccggcagaatgacgagagaagcaacgacaaaaagcgatgcacccgcattcacaccgaaaatttggggtgaagccagagggtttctggtcatagcctgcattagcgcccctgctacagctaggctggcgccgacaaaaacgccgattaatgtgcggggaaggcgaagagtagagatgatgagctgttcctttgaaccgtcccatacaaaaagatatttcaatgaatctatgatgccgatgtctgaggctcctactgaaagattcagcccaagcccaaatataaaaataatcagtgcaatgatgaacatcatcagtcttgatgatgagcgccgtttggctgattgatacaacagtctcacttccttactgcgtctggttgcaaaaacgaagaagcaaggattcccctcgcttctcatttgtcctatttattatacacttttttaagcacatctttggcgcttgtttcactagacttgatgcctctgaatcttgtccaagtgtcacggtccgcatcatagacttgtccatttttcaccgctttgagatttttccagagcgggttcgttttccactcatctacaatggttttgccttcgttggctgagatgaacaaaatatcaggatcgattttgctcaattgctcaaggctgacctcttgataggcgttatctgacttcacagcgtgtgtaaagcctagcattttaaagatttctccgtcataggatgatgatgtatgaagctggaaggaatccgctcttgcaacgccgagaacgatgttgcggttttcatctttcggaagttcggcttttagatcgttgatgacttttttgtgctcggcaagcttttcttttccttcatcttctttatttaatgctttagcaatggtcgtaaagctgtcgatcgtttcgtcatatgtcgcttcacggctttttaattcaatcgtcggagcgatttgtttcagctgtttataaatgtttttatggcgctcagcgtcagcgatgattaaatcaggcttcaaggaactgatgacctcaagattgggttcgctgcgtgtgcctacagatgtgtaatcaatggagctgccgacaagctttttaatcatatcttttttgttgtcatctgcgatgcccaccggcgtaatgccgagattgtgaacggcatccaagaatgaaagctcaagcacaaccacccgcttaggtgtgccgcttactgtcgtttttccttcttcgtcatggatcactctggaatccttagacttgcttccgccgcttccgttgttattctggcttgatgaacagccggatacaatgaggcaggcgagcaataaaacacttatgatggcaatcaacttgttagaataggtgcgcatgtcattcttccttttttcagatttagtaatgagaatcattatcacatgtaacactataatagcatggcttatcatgtcaatatttttttagtaaagaaagctgcgttttttactgctttctcatgaaagcatcatcagacacaaataagtggtatgaagcgttaccgtgtctttgagacaaaaacgcatgggcgttggctttagaggtttcgaacatatcagcagtgacataaggaaggagagtgctgagataaccggacaatttcttttctatttcatctgttagtgcaaattcaatgtcgccgatattcatgataatcgagaaaacaaagtcgatatcgatatgaaaatgttcctcggcaaaaaccgcaagctcgtgaattcctggtgaacatccggcacgcttatggaaaatctgtttgactaaatcactcacaatccaagcattgtattgctgttctggtgaaaagtattgcattagacatacctcctgctcgtacggataaaggcagcgtttcatggtcgtgtgctccgtgcagcggcttctctttaattttgatttttctgaaaataggtcccgttcctatcactttaccatggacggaaaacaaatagctactaccattcctcctgtttttctctttaatgttctggaatctgtttcaggtacagacgatcgggtatgaaagaaatatagaaaacatgaaggaggaatatcgacatgaaaccagttgtaaaagagtatacaaatgacgaacagctcatgaaggatgtagaggaattgcagaaaatgggtgttgcgaaagaggatgtatacgtcttagctcacgacgatgacagaacggaacgcctggcagacaacacgaacgccaatacgatcggagccaaagaaacaggtttcaagcacgcggtgggaaatatcttcaataaaaaaggagatgagctccgcaataaaattcacgaaatcggttttcctgaagatgaagccgctcaatttgaaaaacgcttagatgaaggaaaagtgcttctctttgtgacagataacgaaaaagtgaaagcttgggcataaagcaaggaaaaaaccaaaaggctatgacggccttttggtttttttgcggtctttgcggtggtattttgcagaatgccgcaataggatagcggaacattttcggttctgcatgtccctcaatttgctattatatttttgtgataaattggaataaaatctcacaaaatagaaaatgggggtacatagtggatgaaaaaagtgatgttagctacggctctgtttttaggattgactccagctggcgcgaacgcagctgatttaggccaccagacgttgggatccaatgatggctggggcgcgtactcgaccggcacgacaggcggatcaaaagcatcctcctcaaatgtgtataccgtcagcaacagaaaccagcttgtctcggcattagggaaggaaacgaacacaacgccaaaaatcatttatatcaagggaacgattgacatgaacgtggatgacaatctgaagccgcttggcctaaatgactataaagatccggagtatgatttggacaaatatttgaaagcctatgatcctagcacatggggcaaaaaagagccgtcgggcacacaagaagaagcgagagcacgctcgcagaaaaaccaaaaagcacgggtcatggtcgatattcctgcaaacacgacgatcgtcggttcagggactaacgctaaagtcgtgggaggaaacttccaaatcaagagtgataacgtcattattcgcaacattgaattccaggatgcctatgactattttccgcaatgggatccgactgacggaagctcagggaactggaactcacaatacgacaacatcacgataaacggcggcacacacatctggattgatcactgtacatttaatgacggttcgcgtccggacagcacatcaccgaaatattatggaagaaaatatcagcaccatgacggccaaacggatgcttccaacggtgctaactatatcacgatgtcctataactattatcacgatcatgataaaagctccattttcggatcaagtgacagcaaaacctccgatgacggcaaattaaaaattacgctgcatcataaccgctatcaaaatattgtccagcgcgcgccgagagtccgcttcgggcaagtgcacgtatacaacaactattatgaaggaagcacaagctcttcaagttatccttttagctatgcatggggaatcggaaagtcatctaaaatctatgcccaaaacaatgtcattgacgtaccgggactgtcagctgctaaaacgatcagcgtattcagcgggggaacggctttatatgactccggcacgttgctgaacggcacacagatcaacgcatcggctgcaaacggactgagctcttctgtcggctggacgccgtctctgcatggatcgattgatgcttctgctaatgtgaaatcaaatgttataaatcaagcgggtgcgggtaaattaaattaagaaagtgaaaaacacaaagggtgctaacctttgtgttttttaattaattaaaatgtttattaacttagttaaggagtagaatggaaaaggggatcggaaaacaagtatataggaggagacctatttatggcttcagaaaaagacgcaggaaaacagtcagcagtaaagcttgttccattgcttattactgtcgctgtgggactaatcatctggtttattcccgctccgtccggacttgaacctaaagcttggcatttgtttgcgatttttgtcgcgacaattatcggctttatctccaagcccttgccaatgggtgcaattgcaatttttgcattggcggttactgcactaactggaacactatcaattgaggatacattaagcggatttgggaataagaccatttggcttatcgttatcgcattctttatttcccggggatttatcaaaaccgggctcggtgcgagaatttcgtatgtattcgttcagaaattcgggaaaaaaacccttggactttcttattcactgttattcagtgatttaatactttcacctgctattccaagtaatacggcgcgtgcaggaggcattatatttcctattatcagatcattatccgaaacattcggatcaagcccggcaaatggaacagagagaaaaatcggtgcattcttattaaaaaccggttttcaggggaatctgatcacatctgctatgttcctgacagcgatggcggcgaacccgctgattgccaagctggcccatgatgtcgcaggggtggacttaacatggacaagctgggcaattgccgcgattgtgccgggacttgtaagcttaatcatcacgccgcttgtgatttacaagctgtatccgccggaaatcaaagaaacaccggatgcggcgaaaatcgcaacagaaaaactgaaagaaatgggaccgttcaaaaaatcggagctttccatggttatcgtgtttcttttggtgcttgtgctgtggatttttggcggcagcttcaacatcgacgcaaccacaaccgcattgatcggtttggccgttctcttattatcacaagttctgacttgggatgatatcaagaaagaacagggcgcttgggatacgctcacttggtttgcggcgcttgtcatgctcgccaacttcttgaatgaattaggcatggtgtcttggttcagtaatgccatgaaatcatccgtatcagggttctcttggattgtggcattcatcattttaattgttgtgtattattactctcactatttctttgcaagtgcgacagcccacatcagtgcgatgtattcagcatttttggctgtcgtcgtggcagcgggcgcaccgccgcttttagcagcgctgagcctcgcgttcatcagtaacctgttcgggtcaacgactcactacggttctggagcggctccggtcttcttcggagcaggctacatcccgcaaggcaaatggtggtccatcggatttatcctgtcgattgttcatatcatcgtatggcttgtgatcggcggattatggtggaaagtactaggaatatggtagaaagaaaaaggcagacgcggtctgccttttttttattttcactccttcgcaagaaaacggattttgaaaaatgagaaaatttcctgtgaaaaatggtatgatctaggtagaaaggacggctggtgctgtggtgaaaaagcggttccatttttccctgcaaacaaaaataatggggctgattgcggctctgctggtctttgtcattggtgtgctgaccattacgttagccgttcagcatacacagggagaacggagacaggcagagcagctggcggttcaaacggcgagaaccatttcctatatgccgccggttaaagagctcattgagagaaaagacggacatgcggctcagacgcaagaggtcattgaacaaatgaaagaacagactggcgcgtttgccatttatgttttggacgaaaaaggagacattcgcagcgcctctggaaaaagcggattaaagaaactggagcgcagcagagaaattttgtttggcggttcgtatgtttctgaaacaaaagcggatggacgaagagtgatcagagggagcgcgccgattataaaagaacagaagggatacagccaagtgatcggcagcgtatctgttgattttctgcaaacggagacagagcaaagcatcaaaaagcatttgagaaatttgagtgtgattgctgtgcttgtactgctgctcggatttattggcgccgccgtgctggcgaaaagcatcagaaaggatacgcttgggcttgaaccgcatgagatcgcggctctatatcgtgagaggaacgcaatgcttttcgcgattcgagaagggattattgccaccaatcgtgaaggcgtcgtcaccatgatgaacgtatcggcggccgagatgctgaagctgcccgagcctgtgacccatcttcctatagatgacgtcatgccgggagcagggctgatgtctgtgcttgaaaaaggagaaatgctgccgaaccaggaagtaagcgtcaacgatcaagtgtttattatcaatacgaaagtgatgaatcaaggcgggcaggcatatgggattgtcgtcagcttcagggagaaaacagagctgaagaagctgatcgacacattgacagaggttcgcaaatattctgaggatctcagggcgcagactcatgaattttcaaataagctttatgcgattttagggctgcttgaacttggggagtatgatgaagccattgatctgataaaagaggaatatgcgatacaaaatgaacagcatgatcttttattccataacatccattcgcagcaggtgcaggccattttgttagggaaaataagcaaggcatcggaaaagaaggtcaagctggtgattgatgagaacagctcactcgcgcctcttcctgcgcatatcggcttgtcccatcttattacgattattggcaatttaattgataacgctttcgaagctgtagcggagcaaagcgtgaaggaagttttgttttttatcacggatatgggccatgacattgtcattgaagtatcagacacagggcccggtgtgccgccagagaaaatagaagctgtgtttgagagaggctattcttcaaaggggatgaggagaggctacggtctggccaatgtgaaagactcagtgcgtgaactgggcggctggatcgaactggcgaatcaaaaaactggcggggcggtattcactgtgtttataccgaaggagaaacaaagggggaatccatttgattcacatcgcgattgcggaggatgattttcgagttgcgcaaatccatgagagattgattaaacagcttgatggattcaagattatcggcaaggcggctaacgcaaaagagacattggcgcttttgaaggaacacaaggctgatttgcttctgctggatatttatatgccggacgagcttgggaccgcgttgattcctgatatacgaagccgatttcctgaagtggacattatgattatcacagcggcaacagaaacccgtcatttgcaggaagcgctaagggcgggaattgcccactatttgatcaaacccgtaacagctgacaagttcaggcaggtgctgcttcagtataaagaaaaaaggaagctgctcatgtctcagccggaggtcagccaatccatgatcgaccatatttttgggaacagtgtgaagacagctttgccggcagagaatttgccgactggcattaattcgattacactgcgaaaaattaaggaagcgcttcagactgcgtcagaaggattgacagcggaggaacttggggaaaaaatgggggcgtcacgaacaactgcccgccgttatgccgagtaccttgtgtcaaaggaagaagcaagagccgagcttgaatacgggattatcggcaggccggagagaaaatattatttggcggcggattagatatgaaaaaatctataatcctattgattattctattgatctttactcagggtgatatcaggcaggcggctgcgccgcgcctgccggacgggccgatagaaattgtcgtccctgccgaaccttctggcggctgggatgtcacagcgcaggcgatccaatcagttttgaggcagaagcagatcgtgaaggatgatgttcatatcgtctataaatccggcggcgggggagagaaaggctggaaatatgtcaacaaaagcagcaaacaaaccatcagcatgacgtccagcttaatattgagcaatgatcttctcgggcaaagcaaattaaaaatggccgattttacgccgctcgccattctctccaaggaatggcagacggttgcattgccaaaaggatcagcgttaacaaatggcaaggatgtgctgaatgagatcaacatgcatcccggcaaggtgagaatcggctttgccccggggtttggcaatgatgatcagctctcgttcgtcagagcggcagatatgtacggcattgacccgtttgacattcaattctcacagtatgacagcagcgaacagctcattcaggcgctgatcagacatgagatagaagcggcttccatgaccctttctgaagcgaaaccatatgaacgaaacggcgatatcacgttagccgctgtaacatctgataaaagacttcccggttttccaaatgtaccgacgtggaaggagcagggaatcccgtttgttttttctcattggagaggaattttgggtccgaaaaatatgtctgaggaagagatttcttactgggatcaagcgctaaagaaggtcacctcttcacctgaatggaggcggaaaataaacgaacaggactgggaaagcttttatttaaacagcagggaaacgaaacggtttttagaagagcaatctgctttttatcaaagcatcatgacaggaaattaagatcccggcatccccgggatttttttcatgccgaaaattgatcaaaaagaacaaaacggttttaaaaaattaaaaatacaaaaaaaacaaattatttacttgcggttggttttcccatacgatggcaaaaaggcaagacaaaaaggggagtaagggagaaaaaaatgtaagcggattcatttaagggggaatggatgtgttagcaatcttaggctttctcatgatgcttgtgtttatggcattgatcatgacaaaacggctttctgttttaacagcattagttttgacgccgattgtgtttgcgcttatcgccggatttggatttactgaagttggggacatgatgatttcggggattcagcaagtcgcgccgactgcggtcatgattatgtttgcgatcttatattttggaattatgattgatacaggcctgtttgatccaatggttggcaaaattttaagcatggtcaaaggagaccctttaaaaattgttgtcgggacagcggtccttacaatgctcgtcgccttggacggagatggctcgacaacgtacatgattacgacaagcgccatgcttccgctctatttgctgctaggcatccggccaattatcttggcaggaatcgcgggagtcggcatgggaatcatgaacacaattccatggggaggtgcgacgccgagggcggcgagtgcgctgggtgttgatccagctgagcttacagggccgatgattcctgtcattgcaagcgggatgctttgtatggtggcggttgcgtatgtgcttggaaaagcggaacgaaagcgccttggtgtgattgaactgaaacagccagccaatgccaatgaaccggcggctgcggttgaagatgagtggaagcggccgaagctttggtggttcaatttattgttaacgctttctttaataggatgtttagtatcgggtaaagtcagtttaaccgtactgtttgtcattgcgttttgtattgcgctgattgtgaattatcccaatctcgagcatcagagacagcgcatcgcggcgcattccagcaacgtgctggctatcggttcaatgatttttgccgcgggggtgttcacggggattttgacaggcacgaaaatggttgatgaaatggcgatctcgctcgtgtccatgataccggaacaaatgggcggattgatcccggcgattgttgccttaacaagcggcattttcacattcttgatgccgaatgacgcgtatttctacggggtgctgccgattttatcagaaacagctgtcgcatacggtgtggataaagtggaaattgccagagcctctattatcggccagccgattcatatgctgagtccgcttgtgccatccactcatttgcttgtcggactcgtcggagtttctattgatgaccatcaaaaattcgcattgaaatgggcggttctcgcagtgatcgtcatgacggctatcgctctattgatcggtgcgatctctatttccgtatgataattcaggcgtaatgacacacactaacggcatacaacattccggaggtgtcattatgagtgatccttatatgccgctgacttcagtcagaagcggaacggggttcgaagcggcaaaaggggtgcacggcctgactgtgcaaattgcgaatgtctattttattcagctgccttctgaacctcactcatttgttttaattgatgccggcatgcctcaatcagccggcatgattgtcaatgaagccaaacaaagattcggtgaagggtttcagctgaaggcgattatcctcacacacgggcactttgaccatattggggcaatcgaagagatccttgagcattgggatgtgcctgtttatgtccattctcgggaaatgccttatgtaacaggtaaaaaggattatcctccggctcgtcctgacagcaagagcgggctggtcgctaagctgtcgccgctgtttccgcggcactccatcgatatttcctcacatgtccaggcactgccggaagacggttcagtcccttttcttgacgagtggatgtggatcgcgacaccaggacacacgccgggccatatttcgttattccgcgatgacggccgcgtgcttgtagcaggtgatgctgttattacagtggaacaggagaaaatggctgacgtcttgatacaaaaacaggagcttcacgggccgccggcttatttcacgcctgacacagagacggccgcggagtccattctaaagctggccggtcttgaaccggaagcgttattgacagggcacggcataccgatgaccggcaaaaactttcgaagtgacttaactgaattggcaaatcggttatcgtctatttgacacccgcaccacgcgggtgttttttattgttttccaggaagttgcagaaaaatcatttgtcttgccgcttaaaaacgatacaatgaaaagcatgaagtgatgtgaaggggagagtttgttggaagaaaaagaaatactctggaacgaagcgaaagcgtttattgccgcatgctatcaggaattgggaaaggaggaggaagtgaaagaccgtctcgaggacattaaaagtgaaattgacctgaccggaagctatgtacatacgaaggaagagctggagcacggagcgaaaatggcttggagaaacagcaaccgctgcatcggcagattgttctggaattcgctgaatgttattgacagacgagacgtccggacgaaggaggaagtgcgtgacgccctcttttaccatattgaaaccgccaccaataacgggaaaatcagaccgaccattacgattttccctccggaagagaagggtgaaaagcaagtcgagatctggaatcatcagctgatccggtacgctggatatgagtcagacggagaaagaatcggcgacccggcttcctgttccctgacagcagcctgcgaagagctcggctggcgcggagaacgaacggattttgacctgctgccgctcatttttcgcatgaaaggcgacgaacagcctgtctggtatgagctgccgcgttcacttgtgatcgaggttccaatcacacatccggacatcgagacgttttctgatttggagctgaagtggtacggcgtgcctatcatctctgatatgaagcttgaggtcgggggcattcattataatgccgcgccatttaacggctggtatatgggcacggagatcggagcgagaaacctcgcagatgaaaagcggtacgacaagctgaaaaaagtagcgtccgtgatcggcatcgccgctgattacaatacggatttatggaaggatcaagcgctagttgaattgaataaagctgtgctgcactcgtataaaaagcagggtgtcagcatcgttgaccatcatacagcggcaagccagtttaaacggtttgaagaacaggaggaagaagcgggcagaaagctgacgggggactggacgtggctgattccgccaatttcacccgctgccactcatatcttccaccgatcctatgataactcaatcgttaagccgaactatttttatcaagataagccttatgagtaaacaatagaaaatcgatgatggccttcaaggctgcgggattcagtcacagagatgtcggtaacctttgagaaagggcttccgttctttacagcctcaacaaacgattgcagggcgttttccggaccctctgccaaaatctcgacacgcccgtcatcacggtttttgacccagccggccagttttcgcttatcagcttccatttgaacaaaatagcgaaagcccacaccttgaacccggccgtctacaatgattcggtattgaagcatgtaaaaaccaccttttctttttatgataatcaatcattttacaacctgtaaaggggatgtgtttgtatgaaaccagagcgctattcagttctttctcttaatctgggaaaaccgcagacgcttgaatatgacggaaagaaaatcgataccggcatcatgaagcgtccggctgaatcagccgtcatgctgtatcgggagaattttgaaggagacggacaggcggacctcgtcaaccacggcggacctgataaggctgtctgtgtctacccggcggagcattatccgttttgggaagagttcctctcaagaccgctgtcaaatgccgcatttggagaaaatctgacggtcgcgggcctgactgaggagaatgtttgcatcggggatgtgttcaggcttgatgaagctgttgttcaggtcagccagccgcgccagccgtgtgtaaagctggcgaaaaagtttggtgtaaaagaaatggtgctgaaggtccagcaaaccggctatacagggttttattttcgcgtgctggaggagggcagggtgtctcccggcgcgaaccttgaattgctgtccagaggagagaagggcatatccgtccagttcgccaaccgcatcaactaccatgatgcaaaaaatctcaccgccattgaacggattttaagtgaggctgcactatcggaaagctggagagcgtcctttatgaaaaaaaaggacaggctgctgccggttgaatagaaaaaagccgcgcatatcaacgtgcgcggctttgccatatttaagattgttttttctttgtttcaagcaggttggcaagaaaataggttttatagctttgaagctttcttccctcatggtgcgtgatcccctgcttttttagttctgccacataccagcctttactgccgtaatgcatgtcagaaaactcctttccctatctgatttcgaaacgattggcattgtaacatctataaaaagatgctgaaaagagatgcggggaaaactgagcctttcgaactagatgtgcgaatgttcttctgtatgtatatgcggagcaaaagccgaatatgatttaatggccggttagtttgatcatgacaacgccaaatgtcataatggcgaaaacaatgccgatatatgtgagcatcccgttttttttcttaacgccgtaaacggttataatgatgccttcaatgaaaaaaatgatgccgaaaataataaaccacatgcagataaaggctcctttcacagacataatagtagtgtagcatatctgaaagagccgggctgtgataatatcaagaaagccgggcgcatatcgcccggctcatgttttattgtttatcaaccaatttgaccagaagctgtgccaaatgttctttctcatcttcgtccgcaacgctccaaagctcttgcagcagcatttcttcaccgttttgcggctcttcatgctttgcgaggtagtctcccaggatcgcagcgctttttacaagcttgccgtcatccaatcccagctttttgcctcggttgacttgttttttcaggtagcctttaaattcatcaaagtcttttaaaatgtcttcttttattgtgccatgcatcgcgttcatttcgttttcaatttggattttttcttgatctctgttcattgcaagacctcctcgtgcagaataatgatgttttacctgctattggaggaggttaaacctgccggaagcccggaatgtgttttacagtttcgtcaggataatcggttcatcttttgtgatgacgatcgtgtgttcaacttgggcaaccatgcttttatccggcgtcttgaacgtccagccgtctccagcttcaacaatcgtttctgctttcgttgaaataaacggttcaagcgcgatgactgtgccatttttgaacagtgcgttatcaaacggatcataatagttcatgatgtggttcggcgcttcatgcaggcttcggccgattccgtggccggtcagggttttgatgacggtaaagccttgagagcgtgcttcatgataaacggctcttccgatctggttttggcgcttgcccgcttttgcctgctgaagccccttttgaaaagcgttttccgcgcattggcaaagcttatgaaggcgttcttctccttcaccgagcacaaatgagatgcctgtgtcggaatagaagccgccaaattcagcggagatgtcgatgttgacaaggtcccctgcttttaaaattttggatgtgcttggtatgccgtgagccacttcatcatttacgctgatacatgtcacacctggaaaatcgtattccttctcaggagctgaaacggcgccgtgctcatcaagcacagcttttccgataaggtcaaggtcttttgtgctcatgccgggctctgccttccgcttcatttcttcacgcgcaagcgcgacgattcttccgatttttttcaggccttctaattcttgatcgtttgttacaatcatctgtcattcccgctttctttttaaataatctagattaagcttaccacaactgtcttaaaaataggaaacacacggacctgggaaaaaagaaatacccccgggaaaattggtatagatcactagatatcttatatggtatatttgaaaaaaaagggtatgaggggatgggtatgctttcatttttacaaaaactcgggaagtcatttatgctcccgattgcggttctgcctgcggttggaattatccttgcgcttggcagagaggatgtatttaatatcccgtttgtctatcaggcggggacggcggtttttgatcatctgccgcttatttttgcgatcggtattgccatcggcatttcaaaagacagcaatggggccgcgggtttatcaggggcgatatcgtatctgatgcttgacgcggcaacaaagacaattgataaaacaaataacatggcggtgtttgggggaattattgccggtttaattgccggttacacctataaccgcttcaaggataccaagctgcctgaatatctcgggttcttcagcggcagacggcttgtgccgattttaacagccattattacgatcattttagcgggcatattcggagtcgtctggccgccgattcaatcgtgtatcaactcgtttggagagtggatgctcgggctcggcggcatcggggcaggcatattcggccttttcaacaggctgttaattccgcttggccttcaccatgtgctgaacaatattttctggttccaattcggagaatataacggagtgacaggggatctggcgcgctttttcgcgaaagatccgacagcgggcacatatatgaccggattcttcccaatcatgatgttcggtcttccggcggcgtgtctggctatgattgtgactgcgaagccgtctaaacggaaagcgacggctggaatgatgattggatttgctttaacagcgtttatcacagggattacggagccgattgagtttgcatttatgtttttatctccgcttttatacgctgttcacgcggtcttaaccgggttatctttatttatcgtcaactggctcggcatccgttcaggcttctctttttcagccggagctatcgattatgtgctcagctatggaatcgcagaaaaaccgctgcttctgcttttggtaggtatatgctatgcggcagtatactttatcgtgttttatgtactgattaaggctttgaatttaaaaacgcctggacgggaagacgatgatgtggatgaagtgctggatgaaaatactgttcaggatgtaaatgaaaacatcatgctgaaagggctcggcggaaaagaaaaccttcaaaccattgatcattgcgccacaaggctgcgactgactgtgaaggataccgctttggtggatgaagcgctgctaaagaaagcaggcgcaaaaggggttgtcaaatcaggggggcaatcggttcaagtcattattggcccgaatgtggaatttgcggcggaagaattgagggctgctgtcaaataaaaaaagcggagagggcaacctctccgctttttcttatttatcttcgttatcctttgacgtttcggaagaatcttcgtcatgttttgtgtaatcataatcagaaggattcaccttcttaaaacctttcggctcgtagaaccgcagcaggtctccgtttatgattttatcggacatttcaagttccttcttgacgagcgagtcttctgacttgtcgacttcggattcatcgagttcttttccggttttcgtgtcgtaatacttaccggatattttcgtgtacttcggtgaaataaagtctccgtttcggaacggaatcacttcacggtgttctttcgataaaatatcagaaccggacatcagatagtccttcgtatccactccgagcagatgcagaatggtaggagccacatcaacgtctccggcatatttatgaactttctcgcccttcacgccggcagcgtggataaagagcggcacccgttgaagctgggcgttgtcgtaatcagtgatttcatccttgccaagcactttcgccatcgctttattgtggttttcagagatgccgtagtggtctccgtacatcacaataatcgatttatcatataacccgtcttttttcagatcattgaagaattgttcaatggactgatcaaggtaatgggctgactggaagtagttatcgacgacagagtcaccaaagtctccagccgggaagtctgtatccccctcatccattccgaatgggaagtggttagacagggtaatgaacttcgtatagaacggctgcggcaggctttccagcagcggcattgattctttgaagaacggtttgtctttcatgccgtagtttttcgtgttttcttcgttcatgtcatagtaagcagaatcaaagaatttatcaatgccttccgccttgtacatttcgttacggttccagaacgtctgcgtgttcccgtggaaagtagcagatgtgtaattcttagacttcagaatcgccggaacggattgcagcgtgttttgcgctttgtttacgaaaactgaaccttgagccagcgggtacagagagttttccatcataaattcagcatcagatgttttaccttgtcccgtttggtggaaaaagttatcaaagtagaacgtttcgttatcatgtgccagtttatttaagaacggtgtcacttctttgccgtcaattttatagtcgatgataaatgactgcaaagattcaagtgaaacgtaaatgacgttttttccttccgctttgccgaaatacacgttattcggcacatcgtaattggctttcatgtagttttccacttccgtcacgtcgctggaatcggcaagcgcgcgctggctgttggacttgatattctgtacagcgtcataaatcgtgaaattgtatgttcccaagtatttcacaagatagttccggtcgaatgatcttgtcagcaattcaggacggtctgattccgcaactgccagattgatcaagaacacaagaattgaagacgcaaaaataattcggaacgattttttgcttgacgtttcggcaggcttgtttactttgatcgccaagatgatcaggatgatcgtatcgataaagtaaaaggcgtcagtcggtctcatcagcgaaaatgcgctgtcaccgagttggccgccgtttgttttagcctgcataatgaccggaattgtaataaaatcattgaaaaatctgtagtacacaatgttggcgtacagtaaaaaagacattaaaaaatgaatcactataatggctgtctgctgtaattttttcttgaacaagagtccaaagccaagaaagaacaagcttgagctaagaggattcacaaaaagcaatattttttgtatcgtgttgtctattcctaagttgaagttcaggacataaccgacatacgttttgatccataacaggacgaccgcgattaagaagaaggccagtcctctttcttttataaatgttttcattgttacactccttttttccgatccagttcgagcgaaacgatagaaaaaacgaacgtatccaatataacacgaatcagcagattagaaaagtgaaaatcgtatgatggagaaagtggcgaaaaacgccgtcgaatcaacgtttcgctttgatattaccaaatgtaaaacaaggtatctttctagaaatagaggaataaaatggtacattgggaattgtatgataaaatataaggtatagataaaaagaggtgaaatgatggatttttcccatattgtgtctgaagataaaattaagcgcgccatcaaagacggggactttcaaaacctcccgggaatggggaagccgctgccgaaggatgacgcggcacacttgccggaatcgctgcgcatgggctatcgtattttgaaaaacgcgggaatggcagaggacgagggcgcgctcaaaaaagagcttatgaccatcgaccatttaatcgaaaagtgctatgacgaaaaagaacgcgagcaattaatcagaaaaaaatctgaaaagcaattgctgcttgataagcttgtcgacaaaaaaggcatgttttcaaagccagcatccgctttttataagaataaagtatatgatcggcttggacgaaacagaccttcttccagctgatttgtcttgtctgcaggatggcgattgataatagccatcctttttatgttccaagttctatgtcaaaaggtttatgtttttccatctatgggaaatgattcataaacgaaaaaagggtgatgggatggaacgactattagtatggatagagcatatatctgattggctgtggggtccgccgctaatcatcctgctgacggggacgggcttgtatttcactattttgctgaaaggttttcaatttcgctatcctttatacattttcaaacagacaatcggcagcgtaggaaaaaagccgaagggagagggcacagtcacaccgcttcaggcattgacctcagccctcagttcaacgatcggtgcagcgaacattgtcggtgtgcccgccgctattatgtttggaggaccaggagcggttttttggatgtggcttattgccttatttgccatggcgattaagttttctgaaagtgttcttgctgttcattacagagaaaaaaatgagcagggtgaatacgtcgggggaccgatgtattacataacaaaagggctgcgcatgaaatggctcggcgtattcttctctgttgcgctgattgtggagctgatcccaagcattatggttcagggaaattcggtttcagtctcgcttgccgagacgttttctttcaataaaatatacgcaggaatcggaattgcatttttgattgggttagtggtgataggaggggtaaagcggatcggaaaagtaacagagtttgtcgtgcctcttatggcaggggcatacgcaggtgccggtctcctgattgttctcatgaatctatcatcagtgccggcgtttttctctctcatcttttcaaatgcgtttacctcttcttcagcagttggagggttcgcaggtgctgcgttggcggaaaccgttcgctggggatttgcccgcgggctgtattctaatgaagccgggatgggaacagccccgattgcacatgcggcagcaatgactgatcatcctgtgcggcaagggttttggtctgtgatcggcattgtcattgacaccttgatcatctgcacgaccaccgcttttgtcgttcttgcatctggtgtctggacagggaagaacgcctcaattgacccggcagcactgacgacggctgcatttcagcattatttcggttctggcggagggtacttcgtttcggtttccctagtcttctttgtcgtatcaaccattatggttgtcattttttacggcgtaaagcaagctgaatttctgttcgggcggctggcaggacacgtgattaaattcgtttatttagcggctattatcattggtgccgcaggcggagcaaaagccatttggggctttttggacttagcattggcttttattctcgttccaaatgtgattgcgctgttgttattgagcagaaaggtaaaagcgctgtacaccgaattctttacatctgaacagtactacctgaaagatataagaaaaacaaaacagaatcctgtttatcaaacaaaagaaactaaaaattcctagtgctttgctttggcgctgaacaacgctttgctttttatgatcaaataaatgagtaaaggcagcaaaagagaaatcactacattaatgattggtttgattctgttaaagtcgattagctgatttgtatttaaaaagaaccaaaagccgcatacgactgagaacatgccggttggtgtatacatggctttcgggtcgatttttgagtgtaaaaacgaaaggccgtataccacgatatatagggaacctgctatcttcaccataatgactggaatccaaaaagccgcgatgatcaggtctgagcgatccagaaaatccgtaatgcggatctgcctgatgaccatataagcaggatcaaagaaagtagatgtcaggttgggaccaaagacagaaattgaagaaaataacatcacggccagcaataaagcgcccagcagtatcgcgaaaatggtgtattttagcgggacgctccggtttgagaagagaagcggaaggataatcaattcccccattgtcccaaacgcgtaatagcctgattgaaggtatgggattagaccttcaaaaacaggtgtcaagttttgaagctcaatttgtgtggccagcgtaaatggaaggcacaagaccaggatgccgaatggaaataggaatatctgcgccattctggtcaatgtttcttttccctctctggcaatacagatcgccacaaagataataacaccgccaagaacagccattggtgttcttgggagaaataaaatgttaatcaaattgatgaaaaaacgtatatcatgagcattgattaacaggaaatacaaagaaaacagtaaaatgataatccggcctgcgattggtgaggaatcgctcagcagctcatagatatttttatcctgatgctttttcatcagcctatgcatgagccagagtgccggaatcacgaggacaacgccgaggatgtagctgtgccaggcattttgtttagctgattcgatcatgagaatcggagcatgctttaatccgactgctaacgtatacagagctccgaaaaataatccttggtatgcagaggtcttgtccataaagcacatcctttctgtcatgttcaaaacggaatatatttaaacaggtgccccagccgcggaagcaggggattcactctcatataaatccatagaaaagcacttcctgcaatcagcaggctgaaggcccattttgttagattgttagcggaacgaaaattcttccattcatatgcgtatatggcaatgcacacaatcaatgtctgtacgatatagctgatcatgctgacgcacctccattaatggctgatcgttttgtataggacaccgccctgctcaatcgtcacaattgggacgacgtgaacctccatatccttatatacctcttcccattcctttttcagcagattcttcgtggttgccgtgcttctgatggtcctgtcttgaaagccggccgggtccgcctttagcttttgcaaacgatgaacggtgctgatcacgtccttctttatggttctgtttagtgctttttgaatgatgtaatactggtcattttctctcgtctcataggttgattggttttccataataattcctttggctctgatctcgattgtcattgacagctttccgtttttttcagcggcatgaaaggatacattggacttttgaagctgaatggatgcttgtcccatttgattcggcaggtctactatgaattctggctggcgggcttgattcagcaacatcagggctgctgtcatgtgtacatctttgaaaatatccatcaatctgtcctttttaaagatcgcaagcccgtcaattttcaaattagatttgcctttccctccaggttttgttttagatgcagagatgaccggtgcatacggatcactgcctatttctactagatcagacatgaatctgcttaagaaaacgggccggctcgttgcgataatggccagctcccgaatcatttccgccggaaactgttcaagctgaacatcggtgtttaaaatgtcccgcgcttctccccggctgactaaaatgagcgccgttaatctgttctgcggatttcgcgttaaaatatcaaagactggggcaacgccgtctctcgccatatcctctccaataatgactgtacgtctgtgggacgtattgattgtccgtgacaaggaggtttgcagcttgttgttcgcttctctgatcgtagtgccggaagctgaatcaacataccatgtttttgaaccggcagttccgccgccgccccctgtttgtccgcctaattgaccgaccaagggaatctgcatggccactcgatactgatcttttttcttatcaatggctgagctgacaacaaatgcaatgtcattgatttctgtccggtcccagcaccccgttagaaggatacaaatgagaagcggcaaaacacacttatatattgttttcttcatcttttgggtcctctcttttcgctcccttctgtccgttgccgcgcgaatacgtgcccggccttctggtcatcgtccaccaaggcgccctgacaaaaatatcttttacttcatctcgtttaaacggagaaatcccggataaataaggaataccgaaagattgcagcttgcataaatggagcactaagataatcgtgccaagcataatgccgaaaatcccgaaaatactcgccaaaaacataagcgggaaacgaagcatcctgatggagatagctaagttaaaccgcggaattgtaaatgacgcgatccctgttaacgatacgatgatcaccatgggggcagacacaattcccgcttcaacagcggctgtcccaatgactagggccccgagaatactgacggtctggccgatggttttcggcaggcgcactcccgcctcacggagagcctcaaaagaaatttccataatcaatgcttctatgatggcggggaaaggaatcggttcacgagcggaggccacactgaacattaagtttgtcggcattaagtcctgatggtatgtaataacggcaacataaatagccggcaaatataaagcaacgaataaaaacatatagcgaagccagcggattaagttagacatcaaataacgctcatagtaatcttcactggcctgcataagctgccaaaacgtaatcgggcctgttaagacaaagggcgtattatctgtgaaaatggcaaatcggccttcgagaagctgggcggcgacagtgtccggcctttctgtgtattgcagctgggggaatggcgagtacgtgtcgtcttcgataaactcttcaatatatccgctttctaagacagcatcaatctttatctttttgattcttttttttactttgtcaatgacctttggatcggcaagcccgtcaatataggccaagacaacatcggttttggttttcgtgccgattttaaacgagatcattttaagctgaaacgttttgacgcgaaagcgcacaagagcggtattgaccctgaggctttcagtgaagccctctcttgaccctctgatggtcgattctgttatcggctcttcaatgcttcttctttgtccgccttttatatttaagatcaggccttttgagtgcccgtcggcaaataaaaccgcgttcccctcaatgatagatgcagccactttactcatactcgtttctgttgcaacacttgaaattgatagagtattttgcagcgcctcttcatgttcatctatttgatccgtcaaatgcgttaagaaagggcggagggcgtgatcctgaatatgttcagattttacaattccttcgatataaacaataaatccgcacagcccgtttccaaagtcaaattgtctaaatacgatgtctgagcagccttctgttaataaggtcagattatcgaggttttccttcaaattgggagagatcggtctgtcctgattgtcttcaagctctttgatgagctgaagcgctttgtcgcgtttattcatagaggctcaccctgctttttaatgtcatattcaataagtgcttgtgacttttagggtaaccttgtctgtttcatatattccagactaggatgaaagcgctataaaaaagtgttgactacctgtatatacaggaatacaatatgattataagttgtatatacaagttataaaaacggatacggaggggttggcatgggggaactgaacaaatcggcacgtcagattgtcgaagcagtcggcggtgctgaaaatattgcagcggcaactcattgtgttacacgtttgcgttttgctttaatagatgaaagcaaggttgaccaagagatgcttgatcaaattgatgcggtaaagggatcattctcgacaaacggacagtttcaggtcgtaatcggccagggaactgtcaataaagtatatgctgaactggttaaggaaacggggattggcgagtcaacaaaggatgaagtgaagaaggcctcagaaaaaaatatgaatcctttgcagcgtgctgtgaaaacgcttgcagacatttttattccaatattgcctgcgattgtcacggcgggtcttttaatggggatcaataacattttaacggcggaaggcattttcttcagcacaaaatcgattgtgcaggtttatccgcagtgggcggatcttgctaatatgattaacctgattgcaggcacggcctttacgtttttgcctgcgttaatcggatggtctgcagtcaagcggttcggcggcaatccgcttctcggcattgtgctcggggttatgctcgtgcatcctgatttgctgaatgcgtggggatatggcgcggcagaacaaagcggagagatcccggtatggaatctattcggcctagaggtgcagaaagtcggctatcagggccaggtgctcccaattttgcttgcttcttatatgctggcgaagattgaggtatttttaacaaaacgcacacctgagggcatacagctgctcgttgtcgcaccaattacgcttctcttaacgggatttgcctcttttatcattatcggcccgattacatttgcgatcggtaatgtactgacttcagggcttatctcggtgtttggttcttttgccgcactgggcggtctgttatatggcggtttctactcagcactcgtgattaccggtatgcatcacacgtttcttgcagtcgacctgcagctcatcggttcaaagctcggcggcacctttttatggccgatgctggcgctttctaatatcgcacaaggttcggcggctctggccatgatgtttatcgtgaaggatgagaaacaaaaaggcctctccctcacatcagggatttctgcttatcttggcattacagagcctgccatctttggggtgaatctgcgatacagattcccgtttatcattgcaatggtcagctctggcctggccggaatgtatatttcttctcaaggtgtgctggcaagctccgttggtgtcggcggcgtgccggggattttctcaatcatgagccagtactggggcgcgtttgcaatcgggatggctattgtattgatcgtgccgtttgccggaacatacgcgtatgcgagattcaaacataaataacaaatggggagcgggacgtgttgaacgttcccttttcccattttcaatttaaatatggtggtggagacagatgaaaacagaacaaacgccatggtggaaaaaagctgtggtttatcaaatttatccgaaaagctttaacgatacgacgggaaacggtgtcggcgatttgaacggcattattgaaaagctggattacttaaaaacacttcaggtggatgtgctttggctgacgccgatttatgattctcctcagcatgataatgggtacgatattcgtgattattactcgatttatcctgaatatggtacgatggaggattttgagcggctagtgtccgaagcacataaaagagacttgaaagtcgtcatggatcttgttgtcaatcatacgtcaacagagcacaaatggtttcgcgaggcgatctcttccatagacagcccgtatcgtgatttttatatatggaaagacccgcaggaaaacggttctcttccgacaaactgggaatcgaaattcggcggctcggcatgggagcttgacgaagcatcgggccaatactatttgcatctgtttgatgtgacgcaggctgatttgaattgggaaaatgaagaggtcagaaagcatgtctatgacatgatgcatttttggtttgaaaagggaatagacggctttaggcttgatgtcatcaacctgatttctaaagatcagcgctttccgaatgcggaggaaggcgacggccgctctttttacactgacgggccgcgggtgcacgaatttctgcatgaaatgaacgaaaaggtgttttcacattatgacagcatgacggtcggtgagatgtcttcaacaaccgtagaccactgcatccggtatacgaatcctgacaataaagaacttgatatgacattcagcttccatcatctcaaggttgactatcctaacggcgaaaaatgggccttggcgccgtttgattttttgaagctgaaggagatcctatctgactggcaaacggggatgcacgcaggaggaggatggaacgctctgttctggtgcaatcatgatcagccgcgcgttgtatcaagatatggagacgatggcgcatatagggtgaaatcggcgaaaatgcttgctacggccattcatatgatgcagggcacgccttatatttatcagggcgaggagctggggatgacgaatccgaagttcactgacataagctcctatcgggatgtcgaatcgctgaacatgtataacgcctttaaggaaaaaggaatggctgatcaagatattacagccattttacaggcgaaatcccgtgacaattccagaacccccgttcagtgggatgctacggaaaatggtggttttacaacgggcacaccatggataccggttgcaggaaattaccgggaaatcaatgctgaagcggcgctgagggatcagaattcggtgttttaccattatcaaaaattgattcagattcgcaaaatgtatgacattgtgacagagggtacgtatgagataattgcaaaggatgacccgaacatttttgcgtatctcagacacggcagcaatgaaaagctgctcgtgatcaataatttttacgggacagaggcggcctttacactgccggactctttagcgcctgacgaatggaaggcagaggtgctgttgacgaacgatgaagcaagggaagggcttcagaacatgacgcttcgcccgtatgagtccattgtttatcgtttaacgaaaccgtgttaaactaagctgggtggtccataatgaaggtgaataaattcatcacaatttataaagacatcgcacagcaaattgaaggcggccgatggaaagcggaggagattcttccgtctgaacatgagttgaccgcacagtacggtacatcaagagaaacggtccgaaaggcgcttcatatgctcgcgcaaaacggttatatccagaaaatcaggggaaaaggctccgtcgtgctcaatcgtgaaaaaatgcagtttcccgtttcgggccttgtcagcttcaaggagctcgcgcaaacgcttggcaaagaaacgaaaacaactgtacacaaattcgggctggagcctccgtcagagctgatccaaaaacagctccgggccaatctagatgacgacatgtgggaagtcatcaggtctagaaagattgacggggaacatgtgattttggacagggattattttttcagaaagcatgtccctcacctgacgaaagaaatttgtgaaaactccatatatgaatatatagaaggagagctcggtctttcgatcagttacgcccaaaaagaaattgtcgccgagccgtgtacggacgaggacagagagctgctcgatttacgcggctatgaccatatggtcgtggtgagaaactacgtctttttggaggataccagtttgtttcaatatacggaaagcagacaccgtctcgacaaattccgatttgttgattttgcgcggcgggggaaatgagagaggcgcctgcctgcggcagcgcgcttttttgtttggtatcaaaattgatactatccaacaaaaatgtgcgtacttttactttttatcataatggctacaatagagatgtgagtaatctaaaggagaggtgttttacatggcagatctaaagacacaaattctggatgcatacaatttcaggcatgcgactaaggaatttgacccgaataaaaaagtgtcagacagcgattttgaatttattttagaaacaggaagactgtctccgagctcactcggccttgagccttggaaatttgtcgtcgtccaaaatccggagttccgcgagaagcttcgtgaatacacatggggcgcgcaaaagcagctgccgaccgcaagccatttcgtcctgattcttgcgcgtacagcgaaggatatcaaatataatgcggactacatcaaacgtcatttaaaagaagtaaaacaaatgccgcaagacgtgtacgaaggctatttaagcaaaacagaagaattccagaaaaacgatttgcatttgcttgaaagtgacagaacattgtttgactgggcatcaaaacaaacctatatcgcgcttggcaacatgatgactgccgctgcgcaaatcggtgttgattcctgcccgatagaaggcttccagtacgatcacattcaccgtattcttgaagaagaaggccttctggaaaacggaagcttcgatatttctgtgatggtggcatttggctacagagtgagagaccctcgtccgaaaacaagatctgctgttgaagatgttgtgaagtgggtttaaataaagaaagctgctcgctaagcgagcagctctttttttatgcctgattcgctctattctgttttctcctctgatgtaagtacattgccgttccgagtgcgctgataagaaatccggccaataggatcgagtacatggatgtggctgtgtccggaagcaggccgccagccggaccgtctgttcctgatccgcccgaaccgtttcctccagagccgttagtcggttgagtgccaggaggcgtatcatttcctccgtttccgtcagttggctgttttccgcctggtttgtcggagccgccgccatgattgccgtcatcaccgcctgtcggttggtcggacgggaatgccggcggtttgttgttcgaaccggaatttaagatcgtgtattcgctgaagtggtttgtatatcctgtcaccatatcatcgtcaactgatccgttatctgtctttgtgaaagctttctttttcctgtcgacatgataaatggcagggttatgggcttcttcaatatcaaacatgcgaagcgaaagctgaacgggctccttgaatgattttatttcttttcctttttgctttactgtaaagtcatatacatctgccaatgacacattcaattctcccgtcgacttgattccgattgcagtgtctgcagttttaaggttcgccattggcatcttcatgctgtaccagtagttgaacaccgtcaatgaaggatctgactctctttctttcaaaagtttgacctgatctttttttactttgagattgataggcttctcttgagatccttcatgtgttccataatagacaaatggcgtgttggcatttttagcgtaaatcgcaaatttgtcttcatcaagtgtccagctgccgtcctcctgctttgtcggcaggaatacttctttgatccgtccttcaactttaggagagaccttgtttcctagttttttcagctgttcggtgaaaatctcataatcaacgtagccaaggtcttcaccatgggaggcttctgtaaagacagaatatccgtctcctccggcaccaacaaaattatttgttgccacgcggtaggtatcatccgtatttatagcaactttgtctccgttaggcgattcaattttcacttctaacacacggtgtccaggtttgttgtttaatgtaaaggtatattcgattccggccacctgagggaaagcgccgccgccattttccacattgcttaggccttgttcaagggcttctttaatttgttttccggttaaatcggccacgtaaagcgtattgccgaacggcatcacgttgagcacctcgccgagtgtgatatcacctttgtcaatgcctgctctgatgccgccgccatttgttatcgctattctggcgccggctgcttctttcgcttttgccagcataccgtccgcgatgaagtttccgagattcgtttctttcgtgcgcacatgctcacgctggccgtcaagcgccacatccgtgtagccgactttttcattttttacgtcctctaattcatttttgaactgatcgagctcttgttttgcttctgggttttcttctgtatgttcatcaattggcagcacgctcagatttgatttatctgtttgcacaacgcctttttcatcaaacgcgacatcaacgcgccccaagaattggccgtattcttttgcctgtgccacgatcgtcggttcttcgttgtttacgacctccattttgtcaacgagggtgtgagtgtgtccgccgatgatcaagtcaatgccttttacttttttggctagctcaagatcacggttatgaccgatatgggttaaagcaataattttatttacctgttcttcttcctgaatcgctttgacggtgttttgggctgtttcaaaggcatcattgaatacgatgcttttgcccgggcttgatgtggtggctgtatcttctgttgtcaggccgaatacggcgactttctccccgtcaacgtctaacagaatgtaaggatggatgccggcctccttcttttcacctgccgtaaaggtttgcggctttttgacaaatgatttcagcttggactcatttgtcacatctacgtttgcactgacaatcggaaattccggcgcttcaaagtgatagcggttcgccggatcaacggttgcgctgtttccgcttagaaaatcagaaagcactgtcgggcctttgtcaaattcatggtttccgaaggtcatggcgtcatagcccatcatgttcatcattttcagatcggccaaaccgttccatttagtaaaatacagatcgccggaaaacacatctcccgcatcaaggagaatattgtgatttgtttcgctgcgtacttcgttgattttcgtcattcgtctcgctgcatcatcgagatgtgcgtgcgtatcattggtgtgcatgacggtcaggtcccacagtccgtctttaggaggatctggatttgaatcatcatcgaattgcagcttatacacaccatagccttcattcgcagacttgcctacataagcgacatcgtctgctttatcggcaaatggcttggccaaaagcgaggattcaaacgtcagattcgtgccggaaacaggcgcgattgaccagttgttgtctgcttttggattgactgttttttgttcaataatgtaatccatcagcacctgcctgttttcaaccgcagagccgtggacaattttattgctcgtcagatgagggaacccgccgcctccggacgcacgatagttattggtgactacgagaaattcctggcttgggctgatcggcttgccttcataggaaaggttgatgatacgggatgaatccgcattgatcacttttccgttctcattgtatttagccggttttgtcacatcgacctgatatgtgacaccgtcaatcacgtcaaaattataggaacggaaattctcgttcagcaaggcctgatcgccgcctttggctggatcaatttgattgaattggcctgccgacatctccagccagtccttcacttcgctgcctgtcagcttgacgatttgaacagtattatcgtaaaggtacaagtcaccgacatttttaatcgcaagatctccggctggaatgtttgtatagtaattggctccatttctgccgcctgctttaaacggcgctccagcggataaaatcggcaggttcttgtactcggtatccttcatttctttttcggcataccatttttgcgcgtcagtcacgatctgaatggaaggatcatctttgacctgtgcaaagaagctgttaatatctgcttcggttttgccgactggctttcggacatactccagtgtgttttggtgtgtttgctgaatggtgtttgtaacggtttcgtttcttgatgtgacgttgccagcaatagattcaatacttcctttggaatctgctaccttccatgagccgtccgccttttcaagcttgaggtcaatcacgcctaaatatttgccccagctgcttggcatgacgacaggaatgccgttaattgttcccttttccacatcaaattgagcaacacccgcatactcggaggaaggaaagagtccgtgctgatggcccgagataatcgcgtcaatgcctttcgttttagtggcaaggtcaaacacggcgttttctgcgcctgatgattgtgactgcttttcaatgccggtgtgggcgagggcaataatgacatctgcgccttccgccttcattttcgggatcgtttcattggcggattctacgatatcctgcacctgaacttgcccctcgagattctttttgtcccatgtcatgatttgcggcgggacaaagcctatgtagccgacttttactttctgctcattaccgttttcatcaatgagggttttttcattaatcatatacggcgtataacggttttcgccgctagttgttttgacgttggcatttacaatcgggaaatcggctcctttgattgtgccgtcgagaaagtcgagcccgtagttgaattcatgattgccaagcgttccggcgtcgtatttcagcgcattcatgacgctgataatcggatgggttttcgcgccggagataatatcgtctttttgatatttcaccgcgtattcacccagcggattcccttgaatcaagtcgccgttatccacaagaagggtgttagggttttgcttgcggtgcttttggatcaattgcgctgttctcgccagaccgaaatccgccgtttctttgtcgctgtagtaatcgtaatccatcatgttggcatgaatatcagtcgtagccaaaatactcagatgcacctgaggagccgcgctttcttctgcatgaatgggtggtgttgggaggattaggctaagtatcataattgggggcaaaagaatacggagaatgtttctgacgtgtgttcgtcttttctgtattctcaccagttctccacctttcaacgaaatttgtgttacagctcctattgtaagaatattttgtaactatttgtaggtgtttctttatgattattgtaaaagggagaaaaatgagtattatgtatcagtatcaagcgacaaatactgggtatttatgcttatcgtttgtcacaatcgcggaatgtttattttagtgtggctggggtagagtgttttatgtagacatataaagcgggaggttatgaatcatggggaaaaaaattgcagttgttttaacagattattttgaggacagcgagtacactgagcctgcgaaagcttttaaagaagcgggacatgaactgactgtcatcgaaaatgaaaaaggaaaaacagtaaaaggcaagcagggaaaagcggaagtgacggttgacgcgtccattgacgacgtaaatccttcagactttgatgcgcttttgattcctggaggattttcaccagaccagcttcgcgctgacgatcgtttcgtccaatttacaaaagcgtttatgactgacaaaaaaccggtattcgccatttgccacggcccgcagcttttaatcaatgcgaaagcgctcgacggccgaaaagcgacgggctatacgtccattcgtgttgacatggaaaacgccggtgccgacgttgtggacaaggaagtggttgtttgccaggatcaattggtcactagccgcacaccggacgatataccggcatttaaccgcgagtcattggcattgcttgagaaataagaaaaaacggacgcccacgggcgtccgtttttttgttgcttaggcttgagcacctgtcagtttcttgtacctgtaatacaagaaagcagctgcagccgttccgatgaccgcaatgccgaagtcgaatatgaaaatatgagcgatgccccccgcttttgcgataagccctgttgcaatcggcagcagaatcgatgcaagacttgaagcggtcgctacaattccggtaacggttccttttcgcttccagaaaagctctgtcattaacgtaatggtaatttgaaacacacccgcagttgaaaagcctaagaaaaaggcagtgatgtccagcacaactgggatatgaacggtcagcatgactgcgagcgtacataaagtaataataggatataagagcgttatgaagacaggtttgacccatctattcagcaaaacggctaataataaaacagatgccagagatcctatactataatagctcagcaattgtacagatgctgattcagctaaaccggctgctttttgcgcgtagctcgggagccagatttgagaaaccgtaaataaagccgtggatgtaaaaccgatgataatcagtgcggtgccttctttctgaaaaacgggttcagacaagaaaacgggagattcctgttggccgctattagttggtttcttatgttttttaggaaacgaaagcgttgataaataaataatattcaggagatagaccgctgccggcagataaaaagcaaatccgtaaaacatgctgtggtctgctaaaaatgtgatcaaaagcggcaaaagtgcggccccgacagacataaaggccttgaccaagacattcgccgaaccggaagcagtcggaaagagctcagttagggccggatatgttccggcatccatcgctgaatttgcgactccggctaataaggcgaacacaaacgccagctcatagctcggtgataaaggaataccgactaaaaagacggccataattcccgcagaagcgacaacaagcggctttctgccgattttatctgatagaactccggaaatgccgtatgtcagcagtttgccaaacccgatagcggcaatgacataactgatgccggtcggatcggtattccactgttttgttaatgaagacatattggatgcgagaatgatgttgaccatccccagaaagaagtagttgatatacattccggatgctgttttgatagatgtcgtttgcatgcttgtactccttcaaatcttattcgaacactttgctgttttggtttggggaaatgataaaaaagactcgccgagtttccggccagtctccattatttacgaagcgaggctaattcttgagcaatcgcctgcatttcacttgggctgaatgattcttttttcatcaccatgctgtgaaggtacgtgaggtcttcaatcttctcatcactgaaatcctccgctttgattacgccgacgttcagcatgttcagcttttgggaaatctcttcaatcatttgagttaatgtttctgtatttgggctggacaaatggttccatcctttctatgcgcaatataggtatgttttattctaacagaattccatcagaaaaaaaccctattctaaaagcaggctgttcattccaaaaaagtgaagacatcagttgaaaagaaaatgaacatcctactaagatattcatgaaggtttctttttagagaaataggggcaaagaatagggaggttggacaacatgataagcgtgttatttgtttgtttaggaaacatttgccggtctccgatggcggaagcgatttttcgggacctggcagccaaaaaaggattagaggagaaaatcaaggcggactcagcgggaatcggcggctggcacatcggcaatccgccgcatgagggaacgcaggagatattgcgcagagaaggaatcagctttgatggcatgctggcgcgtcaagtcagcgaacaggatctggccgattttgattacatcattgcgatggatgcagaaaatatcggaagtctcagaagcatggcgggatttaaaaacacttcacatatcaaaaggcttttggactatgttgaagattcagatcttgccgacgttcccgatccttactacacagggaattttgaagaagtctgccaattaatcaaatcgggctgtgagcatctgcttgcgtctattcaaaaagaaaaacaattgtgagtgaaaggagaatttgcatgaacaacgaacgtttaatgctgaaagggatatttctcggagctgcggcaggtgcggcgttatcactgctccataagccgacaagacaggcgtgcggcatgagatggctgacatgcaagcataaactttcactgtacaaaagcaatccggagctgttaaaaaacactgtcatcacaaaagtggatgaggccaaaaaactcgcccaaacgctttcaaaggaagtcgactttgtgaaccagcaggtgaaagagctgaagaaaacaacgccgcaagtgatggaactcgtgcaagaaacgaaagagcatttttcaaaaaaatgatcaaacatgcgaggtgagacgacatgagttttttgaaagagcttttcagcagatacacccttcatgaaggacaaagtaaatcagcggagctggcgtatttttttctattgtcactgtttccgtttttgatttttatgctgacgctcaccgcgtatcttccgctttctaccgatgatgttttaggagtcatagaacaatatgctcccgccagtgcgatgtcactcgttgaatccattacccatcaaaccttaaataatcgaaatggcggtttgctgtcattcgggattatcgccgcattatggtctgcgtctaatggaatgaacgcgatcgtccggtcgctgaaccacgcgtatgatgtggaagaaaaccgctcttttatcattgttcgtctaacctcgatttttttgacgattgccatggtatttacgattttagtggctttgcttctgccggtatttggccgggagattggaaggctcgcttctgactttgtcggcgcgtcggatctgtttttatccgtctgggccgccattcgctggggtgtcagcccgcttgtgcttttgattgttttttccgcgctgtatgtgattgcgccgaacaaaaagctgtctctccggtttgtcatgccgggtgcggtctttgcgactatcggctggatcattgtcagcacattgttttcattttacgtcagcacgtttgcgaactatagcgccacttacgggagcatcgggggaatcatcgttctgatgatttggttttacttgagcggcattttaattatcctaggcggagaaatcaacgctcttttacataaacgtaaaaagcttcctgatgaaaatccctaccattagcgcaccctataaacgaacttcggttcaaaaagaagtcggggggatatcgtgatgaccaagcatacgaaaaaaggcggaagccataacaaacaaaattcgaaaagcaaatcgagcaataaaacaagcggaagcgccaacggacaaaacggctaccattagcataaaagcctcctgacatgatgtcgggaggctttttgattaagaagatgaagaataggtttcagccggtgaccagcttttcggtttgcccagcacaagggccagccacacagcgctaagcgtgagagtaatgaagtagaacaagtttgcgctttcaaatgtctgcatataccagccgccggcaaccgggccgaggatgctgccgagactgaatgtaatgccgcaaagcaggttccccgccggcaggaggtgaggcggaagaaggtctgtcatatagctgatgccaagtgtaaaggttgatccgactgccattcctgcaataaaaaagcagccgccgatcacgtaaggcgaaggaaatacaccggcgatgaaaaagcaaagagccccagtcagcaaaatcaccagcagcacattccgcctgccgtatctatcgctgaggatgccgagcggaaactgaaagataatgcttccaatcgcaaatgcgggaaggatgatcgctactgcgtctactgatatccccaaacggagcgcgtacaccggaaggcttccgttcagcgccgtttccagaaagccgtagccaaatgtaggcataaaggcaacccacccaaacagcatggcctgataaaatcgcctgaaactattgtctgatttggtttcatgaggactggtttccgggtatgcattttgtagaaagaaaacaaaaagccacgcaaacagactgatgcagccggacacgataaaaggaagcgacggactcagcttgacaagcggcaccatgaatgggcctgcggcaaagccaaggccaaaggaaagcccgtaaatagacagatttctcccgcgattttgttttgatgacatggaggtcacccacgtttgcgtagaaaagtgaagcatgtggtcgccgattccaatgaacaggcgaagcaggaaccagacccaaactgactgaagccaaataaatccgaataagcttaaaatgacaatgcttccgcccatgacgatcagcggcttgaacccgagctttctgagcggcgcttccataaacggcgaagccaaaagcacaccgatatacagcccggtcgcgtgcaggccgttgatagcagcggattctccatttgtttcaaaaatgattgaaatgacaggcagcagcatgccttgtgaaaacccggaaatggatacgagcaagacaaggataaagaaatgaaatcgtgacatcgtgtcagttctccttatatggaatctatgttgatcgtacaatgttttccaaaagcaggcaacctgaaaaaagcctatatcacgctatacatttgccctcgtgtaatcatgaaggtttttgtgaagaataaaaataaaacaagtcataaaaaaggagctatttcaccatgaatcgtatcttttttattttagtggcggccggtgttccgctttctgtgattggcagtttgatgcattggccttccgcggttctatttgcagtttattgcgtgacgattatcgcgcttgcaagctatatggggagggcgacagaatcactgtccatcattgcaggaccgcgtatcggcggtttgttgaatgccaccttcgggaatgcggtggagctgattatttccctttttgcattaaaggaaggcctgacaggaatcgtgcttgcctctttaaccggttcagtgctggggaacctgttgctggtagcgggcctatcgttttttgtcggcggtttaaaatataagcggcaggaatttaatatccatgatgcccgccataactccgggcttctgatttttgccatcattgtcgcctttgtgattccggaggtattctctgttggtatgggaaacgccagcaagctcaatttaagcatcggcatcagcatcattatgattctgttgtatgtggcggcgctgtactttaaacttgtcacgcatcggggcgtttatcagccgaataatgccgctcagactgaagaagaggaagagccggaatggtcagggaaggttgcgacgattgtcttgtttgcggcaacgattgtggttgcatacatatccgaaaacctggtccatacctttcactcggttgctgaacagttcgggtggagcgagctgtttatcggggtcatcatcgtggcgattgtaggaaatgcggcggagcacgcgtcagcgattattatggccttcaaaaataaaatggacattgcggttgaaattgcagtcggctctacgctgcagatcgctatgtttgtcgcaccggttctcgtcatctgttctatcttttttccgacaagcatgccgcttgtatttacattgcctgagctcgtcgcgatggtatcagcggttctcttgatgatcgcgatttcgaatgacggggattccaactggtttgaaggggcgacactgcttgctgcatatgtcattatggcgatcggctttttccttctttaacctgaaaaaatgatggataacaacaaagcgggatgaaaagactaagggaaaatgccatagaaagagtgatatgatgaaaaagctatttcattccacacttatcgtgttgttattctttagttttttcggcgttcagcccatccacgcgaaaaagcagtttaaggttcctaattctgtcgcaagcatttcaaaggaaaacacgtatccgaatgcttcacaggatcagccaatgcttcagccgagcaagctggcaaaggaattgctcgatcattctgaggtgaagattgaaaatccgcatctcatcaaaatgctgaatgaatccaacatatccggcacaccgcttgcagtagggtatcgggcgacaatatttctcgggaaatgggcgctcggctatgaatcaaatgaaacagtcgcaaactgggaatataaaaaaatcaatacaaaccgtgcggataaccgcggcgggaaagaaacggctgaaatgcattatgcccaggaacagcagtacagagtgaagggcggcctgacagctaaagttccaaatgctgaagatgtcaaaagcatgatgatgcaaaaagcaatgaagaaaacgaaccttccgcttgcatttgagacggtcattggggctggcacaaaacgggatcagatttataaagtcgctcctaaaaaaatcggttatttacatgcatatgcaccggctgtgaatgaaaaaggaaaagtgacttacggagaagtgtacttagtgctgaaaggaaataaacgaaaactcgtcgtgaaaaatgtcacgtcacagggcatcggtgcgtggattccggttcaagatcatgtcacatttggctttcagctttcctcactgccaagataaataaaaaactgattccaactcggaatcagtttttttgtttattgggttctctcgattcggaccgcttcctcaagcatttgcacattgttttggtagagctggcgaacgagaacccgtctgactgcaaggctggcactgaaataatcatcatctttcaccatgcctttaaccgtaaattcgacgccgcgattgattttattcaatgcggtgatgccgtggatttgaaacggttctgtcggattgccgaattcatcccgcttcaatgaatcacgaagctcttcattcagcatgtcacatgcctcttccaacacgctgtacacgcggtccggatcttctttaaagctgataagaaaggattcggtaatccgcataaaatcaatattatagttctctatttgtctgacctcgccgttgctgatggtgagcagcttcccgctccattcccggatttgcagcgagcggaggccgatttcctccactgtcccgttgaacaagttgttgacggtgacataatcgcctttgtgcagctggcgttcatatattaagaatacaccagccagcacatctttgatcagcgattgggcgccaaaaccgatcacgatacctgctacgcccgccccggccaatatcttgccgaaatcatgcacaaataaagaaataacgtaaaagataaaaccaattgttgccgtatactgggtgacagaacggacaaggctttcaatcgttttttcctttttttcttcaataaaatccgtccgtttaaaaaatagctgtaccagccggttgatgataaagacaccgatccaaaggataacggcaacgaggagaatatcgacgattttattttgaaaaatctccgtaagtgtttctttcatccgcatctaactcctggcttgacgttttgtgaagtctgtatcctgataataactgtttttgacaagaacattcggtccgaggcaccggacattcgggcagtggcaacttagttccttcgcaagcttggtctctctccacttttcataggcggaagggaggctgtccgtctgaatgttgccaagcggcggggtatcaccgaaatcggtcacgataatgtttccgtcgaaaatgttcacattcaggcgggatcggccgtcagggtcatttcgcactgtgacgtttttcgccgcgcgaagccggcgaagcagcttttggtcgtcttcgtccggactgcaggcataaaacggcagcgttccgaacagcatccacgtattttcatcacgaatatccagcaagcggtgaatggcctgtctcatctctttcaggctgagggattcaagagcgcttgcgaaatcgcttggatacattgggtggacctcgtgacgctgacatttcatatcttctgtgatttggcggtgaatatgctcaatatgcggaagagttcgtttgttcagcatcgtttccgcagataccattactccggcatccacgagcgtgcggctgttttcgatcattttttcaaaatagcgcgcgcgctgttcgaaggtcggttttctgtccatcatggcaaagccgatttcagcaaaatcttcaactgtaccccagttatgagaaatatgtagcacatcgagatacggaatgatccattcgtaccgctcgatgtcgagggtcagatttgaattaatttgtgtccgcacaccccgttcatgggcatatttcaataaaggaacaacatattcttttactgatttcagcgaaagcatcggctctccgcctgtgatgctgatggatctgaggcgcgggatttcctccagccgttttaacagaagatctattggcagagcattcgggtctttaggctgcaatgtatagcctacagcacaatgctcgcatctcatattgcacagtgtcgtcgttgtgaattcaacgtttgtcagctgcatgtctccgtattggtcaacatccatataggcttcccaagggtcaaactcgggcgtaatcggacgcagcttcgtgttttgtgtcatgactatctaactcctttataaatgggcatactaacgctgccaacagttaattttagacctgatttgccaagatcgcaagtagcgcggcgattgaaaaacggcaaaaaatgagctaccataataaaaaatgaatggaggaacagaatggggaacgccgtaaacaataaagatcagcagattgattatttaaagaacagacttgacatgtttatgaacgtcatcgattcattagaccctgaagcaaccgacgttgaagatatagacaggcttatcagcatgcttgatgacctggaagccaaatacgaacgttttaaaaaagattgggaataaaaccgcgtgcccgccgcggtttttttattggcataaagcaacagtataaaacaaagcccctatctgtaaaataagaaaaaatgcagaaggagcgctggccatgaagtggatgtgttcaatatgctgcgccgccgtattgcttgccggaggtgcagcacaggcggaagcggtgccgaatgagccgattaattggggctttaaacgaagtgtcaatcatcagccgccagatgccgggaagcagctgaacagtttgattgaaaaatatgacgcgttttatttagggaatacaaaggaaaaaacgatttacttaacgtttgataacggatatgaaaatggctatacgccaaaagtgcttgatgtcttaaaaaaacatcgcgtaacaggaacgttttttgtcaccgggcatttcgtaaaggaccagcctcagctgatcaaacgaatgtcagatgagggccatattatcggcaaccattcctttcaccatccggatttaacgacaaaaacagctgatcagattcaggatgaacttgattcagtcaacgaagaggtttataaaattacgggaaagcaggacaacctgtatttgcgtccgccgcgcggcgtgttcagtgagtacgtactgaaagaaacgaaacgcctcggctatcaaaccgttttctggtcggtcgcttttgttgattggaaaatcaacaaccaaaagggaaagaaatatgcctacgatcatatgatcaagcaggcgcacccgggagccatttacctgcttcacaccgtatcgagggacaatgcagaagcgctggatgacgcgattacagatctgaaaaaacagggctacacatttaaaagcattgatgatctgatgtttgagaaagaaatgaggctgccgtctttgtaaaagagaaagacctctccttaaacggagaggcttttctttattttatacatttaatcagtgcggcccagtccagatccccgaagcctttctcaatcccgttttcaaaatggcttttggccagctcggcaagaggaagatttgcagaaacccgttttgcggcggcgagtgccaggttggtatccttcagccctaaagacattttgaagccggccggctcaaatttctgctcggccataatggttccgtaattttgatagactggagaaccaaagagcgcgctggcgatttctaaaaattgtttttgttctaagccgtatttctccatcattaagaaggattcagataacgcctccagcatagacacgagtaagaaattgatgctgattttcgctgcatttgctatcttgctttcttcgccgacgtcaaatacctgctggctgaggctgtcgagcagaggcttggcggtttgcttcgcttccgccggtcctgctgttatgatgcgaagcgcggctttggctgcggcatccggtctgccaaggacgggagcggcgagaaaggattgtcctttctctgcatgagccgctgcgagcttttctgagaactcaacactgattgtgctcatcgagatgtgaatgccgttctctgctaatccttcaagcagcccgtcttctccgaatgtcacggtgctgacagaatcatcatctgcaagcattgtgatgacaatatcagcggactttgccgccagccgcggcgtatcagctgcctgtgcgccttctgtgacaaggtcttctgtcttttgtttcgtccggttatagacagtcaattcgtagcctgcttgaagaacatttcgggcaatgggctgtcccatattgccgagtccgatgacagcaattttcaatctgatcactccctgaatattttttccattataaacaatatgaacagaatatgcatagcgatcggcttataacaaaaaagaacagcttcccgctgccctcatttaaaaatattgaaccatcctttatgtacaaaccaaatcagcatcccgattacaagcgcagccatcaggccaagtacagcaaaatatccgtatttccaatgcagctccggcatgaagtcgaaattcataccgtatacaccggcaataaaggtgagcgggatgaaaatggttgatacgatcgtcagtgtcatcataatcgcattcatccggtttgagtttagcgtcacgtagctgtcacgcaagtcagacgtcatgtcacggttggattccacaatttcagataactttaacaaatgatcatatatgtcgctgaaataggctttcgtttcccgctgttctttcacatggtcaaggcttaaaatccggtagagcaaatcacgcatcggaataatcgtccgtctcaaatgcaataggtctgttctgagatcaaacacctcgttcatcagcgttccatacgttttgtggggacggctttcttcaatttcattcagccggtcttcaattttatacacgagaggaaaatattcatcaacaagctgatccatgatcatataagaaatatgcccgggcccttttttcaatatatccggtgaagcatacaaacgctcccggactttagcgataccgggcgtttcgtgtaaatgaaaggtgacgacaaatttttcgccttgaaagatatcgacttcctccgtctcaagtgtttccttattcagcgcatgaatcacgtaaaaacgatagccgtcataatggtcaagcttcggccgctgcatatgctggaagcaatcctcaatggcaagcgggtgaaaatgaaaaaaatctctcaataacgccgtttccgtatcctccgggccgtaaaaatcaacccagtaccatgcaatatcaggctgttccactcgttcgatcggtatatttttcagcagctgatgctctgttgtgattgcggtaatgttgatcataaacaaccctccacctgccattatatcatgcggtctttatgagaaaagtatacggtactctctgcctaattcaagcggcatgttatactgaacaaaaacggaaaaaagggtggatctcatgtggaaggaaaaagtatctgtcacgcctccgtatcattttgaccgcgtgctggacaggctgtctttagaccccctcaatgctgttgatcgagaggcgagggaagtccgtgtgccaatcagaaatcaagcgggggacgtatgtattgtaaaggtacaggcgttaggccatgcgggcgagcctgagttcctcgtcagcggggaaacggatcagggagaaatgatgaaggaaatcaagcggatttttcaatgggaaaatcatttgcagcacgttctggatcatttttcaaaaacgagcctgtccgccatttttgaagagcatgccgggacgccgcttgttctggactacagcgtgtacaactgcatgatgaaatgcattatccaccagcagctcaatctttccttcgcttacacgctaacagaacggtttgttcatgcgtttggcgagcagaaggatggcgtgtggtgctatccaaagccggaaacgattgcaaaactcgattatcaggatctgcgtgatctgcaattcagcatgagaaaagcggaatacaccattgatacatcaaggatgatcgcagaaggcacactcagcttgtcagagctgccgcatatggcggatgaagacattatgaagaaactgatcaaaattaggggtatcggcccgtggaccgtgcaaaacgtcctcatgttcggacttggccgtcccaatttattcccgcttgccgatatcggcctccagaatgccatcaaacgccactttcagctggacgataagccggcaaaggatgtcatgctggcgatgagcaaggagtgggagccttatttaagctatgcgtctttgtatttgtggaggagtatagaataattcgtctgacaatgaaggaaatcctgcaaacgtgttatactagaaagatgtgaaaaaaccatttcactttctgccatccgcagaaagcttcatatagaaacggagagaacaacgtgaaccaacaaaagaaacaggcgcccgtcgaactgaaggtcggacaaacctttccgctgacgattaagcgtctcggcattaacggagaaggtgtcggctattttaagaaaaaagtcgtcttcgtgcccggcgcgcttcctggcgaagaagttgttgtgcaggccacaaaggtccagccgaagttttcggagggccgcattaagaaaatccgcaaggcatctgagcaccgggtggcaccgccttgccctgtttatgaacaatgcggcggatgtcagcttcagcaccttgcatacagccagcagcttcgggaaaaacgcgatatcgtcattcagtctcttgaacgccatacgaagtttaaagttgaaaacatggaaatcaaagaaacgattggcatggacaacccgtggaattaccgcaataaaagccaattccagatcgggcgctcgcaaagcggcagcatcatcgccggcttatacggccttgattctcatgacatcgtgccgattaaagactgtatcgttcagcatccggcaacgaacaaaacaacaggcatcgtccgccgcattttagaggacttcaatgtgtctgtttataatgaaagaaaacgaaaaggtgacgttcgcacgatcgtgacgagagtcggctttgaaacaggcgaagtgcaggtcgtgcttgtaaccgcaaaagaaacgcttccgcacaaggaagaaatcgtcaaagcgattcaaaagcgattgccagaggtcaaatccattattcagaatgtaaacggggcgaaaacttcagtgattttcggtgagaaaacaaaaccgctcgccggaaaaacagtgattcaagaagtgctcggcgacgtatcttttgaattgagcgcccgcgctttcttccagctcaatccggaacagaccgtcaagctgtatgatgaagtgaaaaaagcggcgcagctgaccggaaaagaaaaagtcgttgatgcgtattgcggcgtcggcactatcggcatgtgggtggcggacggagcgaaggaagtccgcggcatggacgtcatcaaggaatcaattgacgatgctaagaaaaacgccaaaaaacacggcatggcaaatgccacatacgtaacaggaacagccgagcactggctcccgaaatggacgaaagaaggcttccgcccggacgtcgtcattgtagacccgccaagaacgggctgtgacagcacgttcctggacacgatcaaaaaagtcaaaccgaaacgctttgtctacgtttcctgcaatccatccacgcttgcgaaggatttgcagacgctgtcgaaggactatcgcgtggactatatccagcctgtcgatatgtttccgcagacggcgcatgtggaagctgtggcgagacttgtattgaaatcgtctcattaattcctaatcagatctggatttcggcagaatgaacattgccgatttccgggtctttttcgtgcatagcccttgtcctaactgtctgttctcaattttatcttccttctcattctcggagatctttattttaactggcgaaaagagttgaaaaaacgtgttgaaaagcgggtgaaaataagcgttatttaaccgggaaaatatcctcccagtatgattaaaatacatgagtaaaataatgtaaaatcatagatatattttcataatttgtaaaattatatattgacttgcagttattatgtgtgaaatattgattataggaatataaggaaaggtatggcgtatatcatttcaagagtcattcgatgtaaaaagttgaaacattgtaattaaatgaaagaggtgaaaatgatggccaaccccattttaaaatgaataatgtatgagcactacaacaattaaataatagtgccgacgataacaactattacagtaatacctacaatggttatatccttgcgacaatcatgcttcataataatttagattgacacttggctaaaaagtattgcagagaaggaaatggataactaaatggataaagtatataaaaaacgaccgttatataaaagaagttggtttcaaacatttttggcatttttagtatctcagctttattttaattttgtagaattaacgggagggggtcctaagtatagagaaatgaatggattcccagcaaacatagttgaactagatttctttcaaacatatctttcattctatgataatccatggtttaatattattactgttttcttgggagttttcactattatacaaataattacaggggtaacaaaggatattcgaaattaaagcaataacttctgatgccttatttaataatgaaagaaaatgtacactttcttaattatcttatgagtgaagactgcgacacttagtcagcagtctattttattggttctggatcaggcttaccgaattataaccctatacaaatatatagtaggttgccacttgctgcgttggttattttctaaatcatgagcaaatgccaaatgattcagattgaagttcttgaattcttttaaataaggatttattttctcttctcatcctctttactccatgtgattcataagtggtagcagcttaagtagagttttttttattctcttgagtactcagttataccacccccaactcaatttgcttaatcaaagtttatctcttgaaattagtttttccgcaaatatgatattgagatacggatatggtgtagcgttaaatatcttatcctcaataacaggacaattagtttgcgttggtaatatggagaactcatatgatattctatttaggttggaatcctttttatccaaaaagttcaaaagcaaggccactaagaaagacgaaggtcagcgccagtgttaaccacaatataaaaaatagggtagctaatcatcccacgtgaaatgttcaaaatttactatagattgataagaaatgctttcgcatgcgataagtgtaaaagaagcatggtcagttttttaatattgagatacaggtatagccgtatcccctaatgaaaggatttgatttttgttatgacagaaaatttctggcgtgaattaccacggccgttttttgtactggcaccaatggaagatgtgacagatgttgttttccggcatgtagtaagtgaagcaggcagaccggatgtgttttttacagagttcacaaactcagagagctattgccacccggatgggaaggatagcgtgcgcggccgtttgacttttacagaggatgaacagccaattgtggcccatatatggggagataagcctgaaaacttccgtaaaatgagtattggcatggcagagttaggatttaaaggactagatatcaatatgggctgccctgtgcctaatgtggcacagaacggtaagggaagcggtcttatccgccggccggaagttgcagcagagttaatacaagcagcaaaagcagggggattgcccgtaagcgtaaaaacaagacttggtttcacggatgtagacgaatggcgcgagtggctgacacacatactgaaacaggatattgccaatctttctattcatctgcgcacaagagcagaaatgagcaaagtagatgcgcattgggaactcatcccggagattaagaaacttcgtgacgaggtggcaccagatacattgttaacaataaacggggatatccctgaccgccaaactggcttaaaacttgctgaacaatacggtgttgatggaattatgattgggcgcggtatttttacaaatccatttgcctttgaaaaggagccgaaagagcatagcagcaaggaattgcttgatctcttaaggctgcatctggatcttcatgataagtattcagcattagaagcgcgtccgtacaagcctcttcctcgctttttcaaaatttaccttcgcgggttccgaggggcaagtgaattaagaaatcaatgcatgaacacaaagtcaacagatgaagtgcgtgcattgctcgatgactttgagagaaagtatcttgatggtttagagtaacagcagtgcttgattcaaaaaaggctaacaccattcttgactaaaataaacctggatgttcggtaaaataaacaattccgatttccgggtcttttttgtacgcagcttttactcagcctgtcttttctctaatttattgtaagaaaataatggtatatttagtggagataacttataaagggggagaggaaaatgaaacgactatgcatcatcccctgcggcaagaaaaaaatctgggacgtccagcctgatgccgggccggtaagagcagaggacgcttatctcagcccgtttcatcaggtgtgcgagcggtatgcgaaagcatttttcgatgagtgggtgattttgtctgcgaagcacgggttcctccgccctaatgatctcgtttcgggaaattacgatgtcacttttggcaccggtcatccggaaatcatgacagcggacgagctgagccgccaatttcacgaaaaaggcttttctgatatcgaagagctagtcatgcttggcggaaaaaaatatcgaagcgttctaaacgccgtcatcggagagcaccagcatatcagctggccgctatcatcatacaaaggcataggctacatgctccaagcgctgaaccgagctgttgaagaaaagcatgaactgtagcacgtatataagaagaaaagagtgtgaacatgaaaaaacttgtgtttggcttgcttgccattgcgttattcggatgcggactatatatctatcatgtatggttcggtgatccattttcgaaaaatgctgcagaacagaagctagtctcttatgtgaaacaaacctatcctaagaaagaaatcaagatcacgaatggggtatataacgctaaaacctctgaatatgtattcgaagcaacctcccaatctcatcgctacccaatgtgtacgaagggatttctgcatcctaaagtaacgtgcgatggaattgaagaagcgtataccgaatcagtatcaaaacatgtaaatgaagaagcaacgaaggcaatcgaagcagatctgaaaaaagcggttcctcgacttataaaagctgatgctgctttgagtatcgaaaacggacagttcacgttagatacaaaatggaacaaacagctggctgaaaaagcgcctatgagcatgacgattcagttagacgccagcgggttatcaaaaacagatgccgcaaagatggcggaaattgtcagaaaaacgcttaatgaaaagggatatacatactcaaacggcacgatagactgtatgcagaaggacggggacggcggtatcggatatgtcaaatattcaattgattttctttcaaaagcagctattcagtcaaacgatgcagaggaactaggaagttaaaaagatttccaaggaaataaatacgtcgatcattgtcaaaggccgggtgatatccggtctttttttttgcatgctgtaaaacgagacaaatgaatcagtttgagacaaaacgagacacacgtctcaaactgtctccaaagtgaagacgagaagactgattttacgggctcaaaagactggcacacttcttgcatttataatggtgaaccctaaatagaaggaggcgcacaaaatgaaattgttaaaacgagaaggcttgtcattaactgaggaaaaagcgctgtggatgtaccaaaagatgctggagatcaggggctttgaagacaaagtgcatgaactgttcgcccagggagtgcttcccggattcgttcatttatatgccggtgaggaagccgtggctgtaggggtgtgcgctcatttacatgatggcgacagcattacaagcacccacaggggacatggacattgtatcgccaaaggctgtgacctggacggcatgatggcggaaattttcggaaaagcgaccggattgtgcaaaggcaagggcggttctatgcacattgcggatcttgataaaggcatgttaggcgcaaatggaatcgtcgggggcggctttacgctcgcatgcggatcagcgctcacggctaaatataaacagactaaaaatgtaagcgtttgctttttcggggacggggcaaataaccaaggcaccttccacgaagggctgaatttagcggctgtatggaaccttcctgtcgtgtttgttgctgaaaacaacggctatggcgaagccaccccatttgagtacgcatcagcctgtgattcaatcgccgatcgggcggctgcttataacatgccgggggttacagttgacggcaaagatattttagcagtttaccaggcagccgaggaagcgatagaaagagcaagaaacggcggcggcccgtctttgattgaatgtatgacctacagaaactacggccatttcgaaggagatgcccaaacctataaaacgaaggatgaaagagttgagcaccttgaagaaaaagatgccattcaaggttttaaaaactaccttttaaaagaaacagatgctaataagctgtcagacattgaacagcgtgtcagcgaatcgattgaaaaagccgtctcgttcagcgaagacagcccatatccaaaagattcggagctgctgacagatgtgtacgtgtcatatgaaaaaggaggaatgtaagagatggcgagagtcataagcatgtcagacgcgatcaatgaagcaatgaagcttgcgatgagaagagatgaaaatgtgcttttgatcggtgaggatgttgccggcggagcggctgttgatcatttgcaggatgatgaagcatggggcggtgtattaggagtcacaaaggggctcgtacaggaattcgggcgcacaagagtgctggacacaccgatttctgaagcgggctacatgggtgcggctatggctgcggcatcaaccgggctgagaccgattgcagaattaatgtttaatgactttatcggcacatgctttgaccaggtgatcaaccaaggggcgaaattccgctatatgttcggcggtaaagcgcaagtgccgattaccgtccgcaccacatacggagcgggatttcgggccgctgcccagcattcacaagcgctgtatggccttttcacgagcatcccgggactgaagacggttgttccatccagcccgtatgatgccaaaggtctgctgcttgcagcaatagaagacgatgatccggtgttcttctttgaagacaagacgtcctacaacatgaagggcgaggtgccggaagattattatacaattcccctcggaaaagcggatatcaaacgcgaaggcaatgatgttacgctctttgcagtcggcaagcaggtcaatactgcgcttgaagcggctgcacagctttcagagaggggcatcgaagctgaggtgcttgatccccgcagtctgtctcctctggatgaggatgcgattttcacatcgttagaaaaaacaaaccggctgatcatcattgatgaagccaatccgcgatgcagcattgccacggatattgctgcgattgtcgctgacaagggctttgatttgcttgatgcgccgattaaacggattacagcgccgcatacaccggttccgttttcaccagtgcttgaagatcaatatttgccgacaccagataaaattgtcagcgtcacgcttgaattgcttggcgagccggcaatgaattaaaggggggacacaaatggcggtaaaagtagtgatgccaaaattgggaatggccatgaaacaaggggaagtatcgatatggaataaaaaagtaggcgacccggttgaaaagggagaaagcattgccagcattcaatcggagaaaattgaaatggagatcgaagcgcctgaaaaaggaacgctgatcgatatcaaagtgaaagagggagaagaggttccgcccggcacagctatctgctatatcggggacgccaatgagtcggtgcaggaagaggcgagtgcgcctgttgctgaagacaatatgccgcaagccgttcagcccgtcaaacaagaaaacaaacccgcagcctccaaaaaagatcgaatgaaaatatctccagtcgccagaaaaatagcagaaaaagcaggattagacctaaaacaactgaaaggaactggaccaggcggacgaatcgtgaaggatgacgtaacaaaggctcttgctgaacagaaaaaagatcaggcaaagcctggttcggaacagaaagcgcaggaaatcccggtgacaggcatgagaaaggtcatcgctgcccgaatgcaggaaagcctggcaaacagcgcgcagctgacgatcacgatgaaggctgatatcactaagcttgccactcttcaaaaacagctttcatcaactgcggaagagagatacggcacaaaactgacgatcactcattttgtctcaagagccgccgttctcgctctgcaagctcaccctgtgctgaacagcttttatcaaaatgagcgcatcatcacacatccccatgtacaccttggtatggctgtagccttggaaaacggcttagtggtgcctgtcatccgccatgctgaaaagctatcgctgattgaactggctcaatcaatctcagaaaatgccaaaaaagcacgcgagggacgtgcgggaagcgaagaactgcaaggctctaccttctccattacaaaccttggcgcgtttggagttgagcatttcacaccgatactaaatccgccggaaacaggcattctcggcatcggagcaagctatgacacgccggtgtatcaaggggaggagatcgtcagaagcacgatcctgccgctcagcctgacatttgatcacagagcgtgtgacggcgccccagccgctgcattcctgaaggcgattaaaacatatttggaagaacccgcagcattaattttataggaaaagcaggtgaaaacgacatgacattagccattatcggcggcggacctgcaggctatgcggctgcggtctccgcggcacagcagggcagaaacgtgctgctcattgacaaaggcaagcttggggggacctgcctgaatgaaggctgcatcccgacaaagtctttgttagaaagcgcaaacgttcttgataaaatcaagcatgccgacagctttgggatcgaacttccggcaggtgcgatatcagtcgattggagtaaaatgcaaagccgaaaacaacaggttgtcagtcagcttgtccaaggcgtacagtacctaatgaagaaaaatcaaatacaggttgtaaagggaacagcctcctttctttctgaaagaaagctcttaatcgaaggagaaaacggaaaagaaatcagagaggcggaccaagtattgattgcctccggatcagagccaatcgagctgcctttcgctccgtttgacggcgaatggatcatcgacagcaaagacgcgctttctctttccgagattccgtcttcactagtcattgtcggcggcggtgtcatcgggtgtgagtatgcagggctgttcgccagattgggatcgaaggtgaccatcattgaaacagcggaccagctgattccggctgaagatgaagatattgcccgtctctttcaggagaaacttgaggaagacggtgtcgaagtgcatacttcatccagattagagcgggtggatcaaacggccaaaacggcaatatggaaaagcggtcagcgagagtttaaaacgaaggccgattatgtgctggtggcgatcggcagaaaaccccgtcttgacggattacagctggaacaggccggagttgatttttctccaaagggcattccggtgaatgggcacatgcagacgaacgtgcctcatatttacgcgtgcggagatgctatagggggcattcagctggcgcatgccgctttccatgagggcatcatcgctgcttctcatgcttccggaagggatgtcaaaatcaatgagaaacatgtgccgcgctgcatctatacgtccccagaaatcgcgtgtatcggaatgacagaacgacaggcaagaagcatatacggggatgtgaagatcggcgaattttcattttccgcaaacggcaaggcgctcattaaacagcaagcggaaggaaaggtcaaaatcatggctgaaccggaattcggcgaaatcgtgggtgtctcgatgattggcccggatgtaaccgagctcatcggccaagcggcagcgatcatgaatggtgagatgacggcagatatggcggagcattttatcgccgcccatccgactttatcggaaacattgcatgaggcgctgttaagcacgatcggccttgcggtacatgcataataaaggaaaaagcaggcgcatggatataaggcgccggcttttttattgttgaaagcgctttatttttcccctacaatagatgaaaacggcgtgtaagggaggagcgatcaaggaaatgaattcggtcccaaacgatttgcaaacctggaaacgttttgtgaaagacggtgtgcttgacgaagcccgattaagaaaacggattgcagagtcatggcatcgctgcaaaaaagctgaggtcaatccttatttagaaaaaggcccgaaggttttacagcaaacggagctggatcagcagtcaaaaaaacattcattcttcttgacgaccgcaaagccttacctcgaaaaactgctgcctgccataaaagaaatggaaatgatggcgctgctaattgatgcagacggtgttgttctggcattggacggccatcccctcgcgctctatgaagccaaacgcatcaactttgttgaaggggcatgctggacggaaacggctgtcggaacaaatgcgattggcacggcgctccacatcagcgagccggttgcgatacaaggatcagagcattactccattgcttcccatctttggaactgttcagccgctccgattcaccatgaggatggcagccttgcgggtgtgattgacatatcgtgtccggcggcaggcgctcatcctcatatgctcggtattgccactgcgatcgcctatgcagctgaacgggaacttgcagctaaaagccgtgagaaagagctcgagctgatcagccgttttggagagagggctgcatccagtgtgccgatggtgctatgcaataacaagcagcacatcatcagtgcgagcataccgattcgaacctcaatgcctgattggcagggccggcacctgtatgagttgaaggaacggggctactcaatcgaaaaagctgtcaccataggagatggcggcacttgtttttatctttcggaacaaaagaaaaagaaggtgttccgattcaatggagtgatcgggaaaagcggccgatcgcaagcgatgctgatgaaccttgaacgtgcagctgcggcagatgcaacggtctgtttgtcgggcgaaactggtacgggaaaggaagtcgcggctcgcgctcttcatgagaacagtgagagacgtcacggtccgtttgttgctgtcaattgcggagcgattccgtctgatttgattgagagcgaactgttcggctatgcagagggcgcttttacgggagcgaaacgaaatggctataaaggcgcctttcaaaaagcaaatcaaggcacattatttttagatgaaatcggagaaatttcccactcgatgcaggttgcacttttacgggtgcttcaggaacgcaagataacgccaatcggcgggacgaaagaaattccggttgatatcagagttattgccgccacacattgtgatttacgcgagcttgccgaaaacggaaaaatcagagaggacttgttttaccgtcttcatgtctatccaattgaactgcctccattacgcgatcgcaccgaggatatcccggacctctttgagtactacaaacagaagaatcattggccaggcgaacttccttctgatttttgtcatgtgctgaagcaatggaagtggccggggaatatccgtgagctgtttaatgtgtttgaacgtctttctatcagatttccggacggccggctgagggatgaaccgcttcccgctttactggaagccgctggattgccggccagctctgcagaaaaaaagccggctgctgccggcgtgcttacctttcgtgagcaaatccaaaaggatatgatgatcaaagcgcttgaatctgcaaaaggaaacgtctctcaagctgccaaaatcagcgggattccccgaagcactttctacaaacgcctgaaaaaattcaacttgtccgctgaatcgtaaagcatacttccttcaggaaatggaaacgttatgtattgaaggagggtgttacgatgaatattcaaagggcgaaagaaatagtagaatctcccgatatgaaaaaagtaacatataacggcgttcctatatacattcagcacgtgaatgaagaaaacggaacagcaagaatttatccgcttgacgaaccgcagcaggagcatgaagtgcagctgaacagcttaaaagaggattaaacaaaaatggcccgcttcataagcaggccattttgttatccgcgcggcgcaaataaaataacacagacaccgatgagacaaatgaatgcgccgatccagtcatacagatcaggtgttttccggtcaacaagccatccccacaggaccgcaagcacgataaatactccgccataagcggcgtatacacggccgaaagatgggaaggactgaaacgtcggaagaatgccgtatacaatgaggatcagcgccccggcgattccatagccggctggctttgcctctctcagccatagccaaaccagatatccgccgccaatttcggcaagccctgccgcgagaaataaaagaatggtaatcagcatcatgagcactcctcaatttgcatttatctttcattatagaggaggagagcttttaaagcttcggatgattctcaaattccttcaaatacgcttttcgctgaacctctgtaaattggctgatccaattgttttgagcctcttcattcaaatggggaaggacatagcgttcaaccgcttcgaaaaacagcggattcgcgatgatgttccaggtcgggatgcgaacgattttcccgtctgttttctcgatgataatatcctcaaaaaagatccctttcagactgtattggtgacgtcccatataaagccgcttcacctcggaaaacagcacgctgcgctttctcgagaagatctcgccactaggtccggtctttatgctgaaaatgacatttccacggcttgtgaacgcaggaaaagccataaagaatgtgatcaatccataaattatcgccagtaatccgccgcccaaataaagcagggcatatttagattcaaacgtgagagcttcagccaccagccagactcccacaataaaggcgccccctgtagcgaggaacagccatattctaaaaaacagtctgcttttgaccttaatgacttcattgtttttcaattgctattctcctttatcgctctttagcaaaaagtattccttttatcacatctttatttgctgttacgatagaaaattcattttgggtaatacctgttaccagccaagtatgacggctgccaggcaggacgaaagccatgtcagctacttctggggagttgtctttgtcataaaccagccgcatcagcgtatccatttttccttttcgcaaagccagatcatttacaaaacgggtaacgtcctcttggtgatcatgcttatctagaaactccttgagatgtgtgggagtgtctgaagcgccctccaaaagcaattcaaattcagttgatgtcagagagagcattgattctttgtgatcttctgcatctattatatttaaaaactcggatgttttagagagtaatccattagttgaatccatttttttgattctatgcacctgttcatcaaacagcaattcatgagagtaagtgccaaactttgaaacatggcaggatatattctgttctttgccttgttcatcaaatttggacagcttcactgtatagtccgcgtcgtttaacacatggataaacggacagtattcgtcctttagccgatattgatgattccgatattccgcagcgtccttggctaagagtgagcggcacgcggcttcaaataaggcgccgagctgttcatcttctatttcgggaaaataggcttgttttaaggccattccctgttcgaaaaacccttcgctgtaaaaacaaaacaagagttcttctatgctgattgtaaactgcttcattgtttattctcctatccaaatgaaaatttccctttaaggaaatgggttgcgccgtgtatgagcgaatccgctgttttctttgctttttctattccttttttcgcactgtctatccctttatgtatcgttttattcgccgcatctatgccgtcattcactgatttgacgactttgccggctgattccagtccttttttggctgtatcaacgacagcatggatcggttctttaagttttatcgctgctttttcagcatagactgatgtgaattttgcgattttttccccaacaaaccctcctactgccgaaccaattgtgcctccgattactgtgcctacaggacctaacacacttcctacggcaccgcccacaacagcaccagctgtcgcaccgcccgcaataaaaatggtgttattcacagcatttccgacagccttggcgttttcacgcttgagaacttcgggtttattctggtattttgcataattttcagcaattttcacgcctgctccgaatgtttcggtcgcaccggtaatcagtgtggcggtaatggcatttcctttcgcgaatctcaagcccgtttttcccacatccttcaaagtggagcgtacgccggcttcattaagaaatccttttgtgtagcttctgacgctgtttgaaaaatccaccgtgtcctgagggaagtattttgtaaactttttatgtaccaaatctgaaaatggacggttggtcttttttaacaaatatttaggattcaaaagcactcttgccgctttttgataacgtgagctgtcaacggccctggaaatatccaagagcagttttgagtgctgggctgtatgcaagccgcttggctgtttcacaaatttcgtaagccctaatccgtaatattttccctgcgtcagcataagagcggttaagcttgtcatcgtaccgtatttgtcgtaggcattgtagagctttcgcaaaatatcatcttgttccacaaatttatcgcctgtttttctgatgaaaatctcattgtcactcagcttagtgacgagcgcctttcctgagctccacgcatcgcccactccagaaaaacagctgctgtagcggggatcgcattgcaaaatcatctgccccagctccacatgcaggtccttatatttgttttccatatcagttaattcagtgactacatcatttgcaagctgttcgagcttatccggatcaactgcaatgtttcctgacacaccgttcacctcccgagtttatgtctttcctctcttgctttacgctccagttcttccattctggcaatttcagcttttcgttcttctattttgacagcggcagccttcagctcttggcttgtttcaagcagctcctgttcgaattgatcgtaggcggctttcgtttcctcgaaatcctggtcaaacgaatctcttgatttgccctgccaagcatctcccaatgcagataaccgggattcaagcaacattttggagcttctgacctcttctgcggccgcactgtacttgtttgccagctcaatgactttatatgagtccaacttttgtcccctgccttttctaaattcacgcacaattggatgttttatataaatgattataaataattcggcatgtatccgaatcgtacaaaagaaccttttcataagaattggaagggcgtatattcacttaaaattcacagttggtgagactttaagattacaaaaaaggtaaaaaaaacaaatccctcagacataaggcaaatgagaaatttcccgctctatgggaaaaaacactaaagttgatcaaatgacctaagtgcgccaaacgtgttacgggacgggctatctcatggtataaatggaattgtaaacgttatcaaggaggtcgtcatatgaagaaaaaatcattctcaatcgtaatagcgggcggagggagcactttcactccagggatcgtactcatgctcttggaccatttggaggagtttccgatcagaaagctgaagctgtatgataatgataaggagagacaggatcgaattgcaggcgcctgtgacgtttttatcagagaaaaagcgccggatattgaatttgcagcgacgactgacccggaagaagcttttacagatgtcgattttgttatggcgcacatcagagtagggaaatacgcgatgcgtgcgcttgatgagcaaattccgttaaagtacggagttgtcggccaggagacgtgcgggccgggcgggatcgcatacggtatgcgttcgatcggcggtgtgcttgaaatattagattacatggaaaaatactcgcctgatgcgtggatgctcaattattccaatccggcggcaattgtggctgaagctacgagacgccttagaccgaattctaaaattctcaatatctgtgatatgccggttgggatcgaagaccggatggcgcaaattcttggcttatcctcaagaaaagaaatgaaggtccgctattacggattaaatcacttcggctggtggacatcaattcaggatcaagagggcaacgatttaatgccgaagctgaaggagcatgtatctcaatacggctatattccgaaaacagaggctgaagcggtggaggcgagctggaatgacacattcgccaaagcgcgtgacgtgcaggccgcagatcctgatacactgccgaatacgtatttgcaatattatttgttcccggatgatatggtgaaaaaatcaaatccgaatcatacgcgggcaaatgaagtgatggaagggcgcgaagcttttattttcagccaatgtgacatgattacacgtgagcagtccacagaaaacagcgaaatcaaaatcgatgaccacgcatcatatatcgttgatcttgcccgggcgattgcctacaacacaggtgaaagaatgctgttgatcgttgaaaataacggcgcaattgcgaactttgacccgactgcgatggtcgaggttccatgcattgtcggctcaaatgggcctgaaccgattaccgtcggcaccattccgcaattccaaaaagggcttatggagcagcaggtatccgttgagaagctaactgttgaagcgtgggcggagaaatcgttccaaaagctgtggcaggcgctaattttgtcaaaaacagtgccgaacgcgcgtgtggcaagactcattctcgaggatttaatggaggccaacaaagacttctggcctgagcttgatcaaagcccgacccgtatatcataactgaaattcccccattttcgaatctgtaattgtatataatagaaagaaaatggggggatctgatatgcagctcgaagaactgatcaatcagcactacagcaaattgaatgacaacgattttcatattttaaaatatatattgaatcataagcacacatgctatcaccttggaatcgacgcgctggccaaagcttgcagtgtatcgcgttcctcaattttacggcttgcccaaaagctcggtttcagtggctacagtgaatttcgcgtctttttaaagtgggaagatcagccggaagaaggcgagagtatgagttttgaaaagctgcttgatgatattgaagcaaatttgaagttcttacggacaaaggacatgacggacatgtgccagctgattgatgaagctgaccgcattttcgtctacggttctggaaatgcgcaaaagatatgcgcccgcgacctgcaaagaatgtttattccgcgccatcgctatcttattttaattgaagacacaaatgaatttaatttgatgcgcgatgattttaaagtaaacgatctgtttatcatcatttctctttccggagaaacaccggagctgattcctcaggcaagaatgctttctgcaaagggtattccctttatttccattacgaatttaaaaaacaatgtcctcgcccagctgactccgcataatctttatgcgacaagcaaacctgtgacattaagcgataaaacggaaattgtcgcttttgcaccgttttttctcgttggcgaagcattgttccgcgcatatgttgattacaaagaggcagaaaaaaatgacaatgagtagcagggggttctggtatgatgcaaaaaattcagcgctttggaagcgcgatgtttgtgcctgttttattattcgcgttcgccggcattatcgtcggtatcagcacgctctttaaaaataaaaccctcatgggcccgctcgccgatcccgacggtttttggtatcagtgctggtatattattgagcagggcggctggactgtttttaaccaaatgccgctcttattcgccatcggcatcccggttgctttggcgaagaaagctcaggcacgcgcttgtttggaagcgcttactgtttacctgacattcaactattttgtcagcgcaatattgacggtatggggaggagcatttggcgtcgacatgaatcaagaggtcggcggaacgagcggattaacgatgattgcgggcataaaaacgctcgataccaacattattggagccatctttatttcttcgattgtcgtctttttgcataaccgctattttgataaaaaactgcccgattttctcggcatctttcaaggctcaacatatatcgtgatgatttccttctttattatgattccgattgccttggctgtgtcttatatttggccgatggttcaatcgggaatcggctcgcttcaaagctttctggttgcttctggggcggtgggcgtttggatatacacgtttttagaacggattttaattccgaccggccttcatcactttatttacacgccgtttatttatggcccggctgtagcggaaggcgggatcgtcacgtattgggcacagcatctcggcgaatattcgcaaagcgccaaaccgctgaaggagctctttccgcaaggcggattcgcgcttcacggcaactcgaaaatcttcggtattccgggtatcgccctggctttttatgtgacagccaaaaaggaaaagaaaaaactcgtcgcagggctgctgattcctgtcacactgacagcgattgtcgccggtattacagagccgattgagtttacgttcttattcatttcacctttcttatttgcggttcacgccgtgcttgccgccacaatgtcgacagttatgtatatggccggcgtcgtcggaaatatgggaggcggactgattgaggcggtaaccttgaactggattccgctctttggcagccacggtatgacatatgtgtatcaaattttgatcgggctctcgtttacagcaatttattttttcgtcttcagatttttaatcctcaaattcaatatcgctacaccaggacgggaaaaggatgaacagcaggaaacaaagctatattcgaaaaaggaatacagagaacgaaaaaacaaggatgaaacggcctccgctgctgaaacggctgatgacaccgcttttctgtatattgaagcgctgggcggaaaagacaacatcactgaagtcacaaactgcgccacccgcctcagagtcagtgtcaaggacgaaacaaaggttgaacccgacagcgtattccgcgcgcttggcgcacacggcgttgtcaggaacgggaaggcgtttcaggtaattatcggattaagcgtaccgcagatgcgggagcgtgtggaaaaaatattgaatcaataaagactgccctccttttcgggagggttttcgtttgccgtcaaaaagaccgccatagtaaagtaaagaaagagacaatcgagtaaaaaggggtttggaggcttttacatgcaaaaggctttgtcgtttttaaaaccatattcattgctggcgggaattgcgctgattcttatgttgacggagcttgcagttgaactgctgcagcctttattgattgcgaaaatcatcgacgatgggatattgaagcaagatctgcggcatgtttggatatggggcgcggtcatgatcgggctgaccgtgttatcctttgcggcggggatgctgaattccttttatgccgcccatgtcagccaaagcttttcctatgatacgagaaaagggctttttcaaaaaatccagtccttctcctattccacatttggacagttttcgtcctcttcttatattacaagactgacaaacgacgtcacacaggttcaaaatatgatttttatgagtttgcggtttatgctgcgggcacccttaatgattgcaggcggcattgtgctgtcgcttgccgttaatgtgaaactcggcttttttctgcttgtgaccattccgatcctgatcttgtttttgctatgggtattaaggaaaggcggggcactgttccgctcagtgcagaaaaggctggatcaagtgaacaccatcatgcaggaaaatttaattgcaatcaagctgatcaaagcgctgcttcgcggcagccacgaagtcaaacgatttatcaaagccaacacaaggctgatggaaaaaacggtttcggcctttcagcttgtggaattcacgatgcctgtactgatgcttttgatgaatctctgcatccttttgattttgtgggcggggtcctacagtattacgagcggaagcactcaggttggcgatgttgttgcgataattaactacgcaacacgaattacaggcgcgctttcgatgtttccgtttttgattatgattttcacccgggcgaaggcttcaggggatagaatcggtgaggtgcttgaaacagaaggcgacgagcgggaggaaggcaccatatctgatcgtttgtcaggacggattgagtttcagcatgtatcctttcgctatcctgaaatggacagagaagcgctcaggaatgtctcattttccgcaaagccaagagaaacgatcgcgattctcggtgcgacgggctcgggcaagtccacgctttttcagctcattccgcggctttatcagccggattcaggccgcatttacatagatgaaaagccggttcaagatattccggctgaagggctgcgcaggcaaattggatatgtaccgcaggaagtcctcttgttttccggcacaatcaaagaaaacatcgcttggggcaaagaaaatgcttcactagatgaaataatggatgcggccaaacatgcgcaaattcatgaaacgattttgaagctcccaaatggatatgacacagttttggggcaaagaggcgtcaacctgtccggcggccagaaacagcgaatttccattgcgcgggcgctgattcgaaaaccggctatccttctattagatgacagcacaagcgcacttgatctgcaaacggaggcgaagctgcttgaagcaatcagcacataccattgcacaactttgatcattacacaaaaaataaccacggcgatgaaagctgatcagattttgctgctagaggacggcgaactgattgaaaaaggcactcacagtgagctgctttctgaatctcagttatacaagcgcatttacgagtcacaattcggaagggaggggagcgagtcatgctaaaagacatccgcaagcctttccaatatcccaaactgccaattgacaaaaaagaaggcgcgaaaaagcgggccaaagcaaaggatacaaagggcacactgagacgaatctggtcttacttggctgaaagaaaaggactgctcatacttgtcatgctaatggttgtcatcagcgccatattcggactccttggtccctttgtgatcggaaaggccatcgaccattttatcgtcgggaaaacggtcagcggcttgattcctgttttgcttcttctgcttgctatctatatcattcagtccctgtcgctttggtttcaaaactattggatgattacgatctcgcagggcacggttttcagaatgagaagcgaattgttcacccatctgcatgagctgccgattccattttttgataaacagcggcacggcgagctgatgagccgggtgacgaatgacatcgaaaatgtcagttctaccttaaatacgtcagtcattcaaattttgtcaagcgtgatcacctttgtcgggaccattgcagtgatgctgtacatgagcccgctccttacattgattacgctgaccattattccggtgatggcagcgagcctgaaatggatcaccaaccgaacgggaaagctgtttaaagaacagcagaaaaaccttggtgatctgaatgggtatattgaggaatctgtttcaggcgcaaaggtcatcaaagcatattcacgtgagaagcagattactgctgaatttctcgaaaaaaacgctgcactcaagacgtcgggcttttgggcgcagacgatttccgggtttatcccgaaggtcatgaactctttgaataacttaagctttacaatgatagcggcaatcggcggtttgtttgcgctgaaaggctggatctcgatcggctccatcgtcgtctttgccgagtattcaagacaatttacacgccctttaaacgatctggccaaccagtttaatacgatgctgtccgcaatcgccggcgctgaacgggtgtttgacgtgcttgatgaaaaagaagagcgcgaggatgaaaagaacgccgtgcatcagcccatccaaacaggcagcattgaattccgggatgtgtccttcggttacgataaagggcagcagacactgaagcatttacagtttaccgtgcctgccgggcagtccatcgcgtttgtcgggcctacgggggcgggaaagacaaccgtcactaaccttctcgcccgtttttacgagcctgacaaaggaaaaattttaatcgacggtacagatattaaaacccttactagagcaagcctgagaaaaaacatggggtttgttcttcaggattctttcttatttcagggaacgatcagagaaaacattcgctacggcaggcttgatgcttctgatcaggaagtcgaagccgctgcaaaaacagcgaatgcccatagttttattgaaaggctgccaaaagggtatgacaccgtgctgacgcaaaacggttcgggcatcagtcaaggacagaagcagttgatttctatagcgagggcggtgcttgctgatccggttcttctcattttggatgaagcgacaagcaacattgataccgttacagaagtcaacattcaagaagcgctcgcccgtttaatggaaggaagaacaagcgtcatcattgcccacaggctgaacaccattcaaagagcggaccagattgtggtgctaaaagacggtgaaatgattgaaaaaggcagccatgacgagctgattcggcaaaaaggattttacagtgacttatatgaaagccaatttgagaaatagacctttgtcctgcacagaggtcttttttgttacagttttatagtacttttatttcattttcgtaaaatgtaacaaaattacttgacgtaaacaagttatgtatatatactagcttacattaagtaagtgataacatttatcaaggaggataaaatgaataaatcatttgaaattggcacattacttttaagagttattacaggtattatcttttttgttcacggtttatcaaagtttcagggaatggagggcaccatccaatttttcggcagcataggccttccaagctttatggcgtatgtcatcgcagcgattgaactcattggcggagtgcttgtcttcttcggattggctacacgtattgtcggtgtactgttcgctcttacactgatcggcgccatcatcactgttaagctgaaagcgccattcatgggcaatgcagaatttgattaccttctgcttttgacatccattcacctggcgcttactggaagtcgattcctggcgctggacccatttgtgtttaaaggaaaaaagaacgaaaacgtttcagcataagaaaagaggcatgcagcatgaccagcattcatgaggatacacacattggctatgccaaactcacaattcgcagtctggagcgttcgcttcagttctactgtaacgtcatcggttttcaagtcttaaaaaagacggatcgccaagcggaattaacggctgacgggaaacgcgtactgcttattcttgaagaaaatccgagcgctgtcgtcttgcctgaacggtctgtgacaggcctttatcactttgcgattcttcttccggacaggaaagaacttgggatcgcgctcgcccgcctgattgaacacggcattgctatcggacatggagaccatgctgtcagcgaagcactctacctgtctgatcctgacggaaacggcattgaaatgtacgctgaccgcccccgcagcacgtggcagcgtgatcgggaaggaaactatgtcatgacgacaaccgctgttgacattgagggccttctggaagaggcaggagatgagcggaaaacatcgcttccgaacgatacaatcatcggacacattcatctgcatgtcagtgatttgaaagaagcaaaggcgttttatacagatgtactgggctttgacattgtcggaaactatgcgggcatgtccgccctcttcgtttcagccggggggtaccaccatcatatcggcttaaacatttgggcgggaagaaatgcgccgcctaaaccgacaaatgccagcggactagattattatactgttgtcctgccccaccaagaggagctggatttggtggcaaaccgagtcaaacacgccgggtattcgattgaagagacggaaaacagctttcgtgtgaaagaccctgtttccggcgcctatattacatttgtgatttaactgcaatccccttgccgaaaaaacggcagggggattttttattttccagaaactcctgtcaaaaatgccctgaggcaggtatgataagaagggaattgggtatcgggagtgatgagcgtgaaagctcttttttttacgagaatgttcaccttgatggtgagctgtttaatgtatctgtccattgtgaaagaggataactggtttggatatgtatttatagcagcaggtgctgccatgtatgcagccaatcatgttttgctgacaaaagagacaaatgccatctggttctgcctgattgatattgcaatcggcttttctttcggatttatctttcccggcacaggtttgttcattattatgctttgtccggttgcggtcgccttttttctgcggaggtttcctaaaagaacagcatggtctgtcttatgtctttcctctattttatttttgaccgtcctcatccgtacatatgcgatgttcggcaatgaatttgtcattgatcatttgactagcatgacattcgttgtcttctgcggtgtcgtgggcaaattaatccgcaagctgttggatgcgcaggatacggcaaaacagcagtttcaggaactgacggagtcccatctggcgctgtctgctgcacatcaggagctccatttatatgcgaagcaggttgaagagctgactgccatttacgagcggaacagaatggcgcgggaaatccatgatacagtggggcataaaatgacggcccttctcgtccagctgcagcttttgcgtgaatggcaaaaaagagacagccaaaaagcggatgagacagtaggtgtctgtgaaacacttgcccgtgaagcgcttgatgatgtccgcttatcagtacgcaccctgcaaactgaaaacgatccttcgctaatcgaatcgctgaaacagctgacagaggacttttgcaaaaatgcaggagtcacaacagaatttgcggtcagcggtgatcctgcaatcatcccgctgtctctccatccgaccctgatcagaacggcgcaggaagcactgaccaatgccaaacggcacggcggcgccgcagcttgttcgatacagcttgcctgcacaacggacagcatcagccttgtcattaaggatgacggcaaaggcaatcccgaggcagcacttggttttggtctcttgaatatgaaaaagcgggcagcggaacatggcggaatgatccgctttgaaagcgaacaggatcaaggatttactgtgaatgcagaattttcacttgccaataaaaaatggagcttcaggcccgtgcagcaaaaggagagtttattatgattaagatcatcattaccgacgatcaggatatcgtcagagaagggctggcatccctgctccagctcagagaagagctcgatgtgatcgcaacagcgcgaaacggacaggaagccttcgaaaaggcgaaagagctggagccggatatcgtattaatggacatccgcatgccggtttccaacggggtggagggaacaaaattaatcacaagctcattgcccggcgtaaaggttttgatgctgacaacctttaaggattcagcgctgattgctgaagcgcttgaagaaggagcaagcgggtacctgctgaaggatatgtcggcagatacgattgtaaaagcggtgatgactgttcattctggcggaatggtgcttccgccggaattgactgcccaaatgctgaatgaatggaagcgtgaaaaacagctgaaaggaataaaagagatagaaaaacctaacgagctgctcgacctgaccgagcgcgaaatcgaagttctggctgagctggggtacgggctcaataacaaagaaattgccgaaaagctttacattacagaaggcacagtcaaaaaccacgtttcaaatattatcagcaagctggctgtcagggacagaacccaagccgccatttactcggtcagatatggtatatctgtcttttgacatatgacgttttgcatatatgcttctctgaaaaggccttttacaggcctttttttcatgccctatgttctatctgccgctacatgccgcacgcctttctttcttctacaatggcaatggatcaaaaaaaggagtgagacgacgtgctgcaagcagaaaacatcaaaaaggcatatggaaaaaaaacaatcgtgaaaggtatttctttttccctccaaaagggggagtcgttcggtctgctcgggccaaacggtgcggggaagtccacaaccatttcgatgatttccggccttgtgccgcatgacagcgggaacatcacggtgggcggctatgtcatcggaaaagaaacggccaaagcgaaacaaaaaatcggcattgttccgcaggaaattgcattatatccgacgctgacggctcatgagaatcttatgttttgggggaaaatgtacggacttacgcacggcgaggccaaaaaaagatcggctgaggtccttgaatatgtcggtctgactgagcgggctaaagataagattgaaacgttctccggggggatgaaacgaagaatcaacatcggtgcggctttaatgcataagcccgagctgctgattatggatgaaccgactgtcggtattgaccctcaatcgagaaatcacattttagaaacggtcaaacagctcaacgaaacgggcatgacggtgatctatacgagtcattacatggaagaggttgagtttttatgcgatcggatcggaattattgatcagggggaaatgattgcgattggcacaaaaactgatttgtgcagccgccttggaggcgataccatcattcagctcacagtcagcgggatcgatgaagcgtttcttttggcgatccgttccctggctcatgtgaatgatgtaacagtccaggagtcagagctcaaaatcgacatttctgcggctcatcatgagaaagtcgtcaccagtctgcttgctgaagccgctgctcatcatataaacctgctgtctcttcaggtgcaggaaccgaatctggagcgcctgtttttgaatctgaccggccgcacgttgcgggattaggaggggcggcaatgaaaaaaagcatatggatcgcatggaaagatgtcaaaatcagaatcacggacagaaaagggtttatgatgcttatcctaatgccgctgatcctaacgtgtattttaggggcggcgctcggatcagttgttgacggaggcaaccggattgatgacatcaaagtcggctacattcaatcagaccagtcagatgcagcgaacatgtttacaaaagatgttctcaaaaaaatgaagtcgataaaggccacaaaagccggcagcgaagacaagatgaagaagctgattgatgaaaagaaaatcgatgtaggcatcgtcatcccgaaccattgggaagccggcaaaacctcagctgttgtttatgccgcacctgatcaaacattgaaaagttccatcatcgaaacagctgccagctcttttatagagcaatataaagcggtaaaggaagccgcgtcagcctcaatggactacatcagcaaaacggaagctgtacagcaaggaaaacttgaccctgcacagtttgcagaaaagctggcaaagacgctagaaaaagaaacaggtgacaagctgactattgcagaaaaatctgtcggcagcaaggccgttaccagctttcaatactattcggcggcaatgctttgcatgtttatgctgtttcatatgacagtcggggcgaaatcgtttttacaggaaaaggatacggagacgcttgccagaatgctgatgacgcctgcgcaaaaatccgtcattctcttcggaaaatggcttgggacgtatctgtttgctatcatacaatttttcatatttctgatcgtcacaatcaatgtatttggtgtggactggggcggtaatctgctgtttgtgagtgtactcgggctttcttacgccgcagctgtatctggtatttcaatgctgcttgcgtcgtgcatcagcgatatgaaatctgcagactcgataggcggcttcggcattcaattgcttgcggttctcggcgggtccatgctgccgctgtaccaatttccggacgtcttgcagtctgtatccaaagcggtgccaaatcgctgggcgcttgacggctttctttctttaatggaagggggaggctgggctgaccttcaaaagcctgtgcttctttttgcggcgatcggcttttgttcacttgtaattggtatcagacggcttcatacaagataaggaggtacaaaaggtgaaaaaaattctagccatttgcggcattgagctttctctcatttttaagaagccacagaactatttgatcatgtttgctgccccgcttttgcttacctttgtatttgggagtatgctcggcggcaatgatgataaggtgcggcttgcaatcgttgatcaggacgatacgattctctcacagcattatattcggcagctgaaggcacacgatgatatgtatacattcgaaaacgtgtctgaaaacaaagcgtcagaaaagctgaaacaaaagaaaattgccgggatcatcgttatttcccgctcgttccagacacagctggaaaaaggcaaaaaccctgaactgattttccgtcacggccctgaactgtcggaagcgtcgatggtcaaacaatatgcagaaagcacattggcaacgctcaatattcaggtgaccgcggcaaaaacggcatctcagacagcgggagagaactggaaggcggcgtataaaaccgttttcgccaaaaaacatgaagatacagttccggctgtaaaacggcagacgctcagtgataaaaaagagggcgcggaagcaagtgacacagcctccagagcagcaggtttttccatcctgtttgtcatgctgaccatgatgggagcggctggaaccattttagaagcaagaaaaaacggcgtctggtccagattgcttacagcctctgtcagccgagtggaaatcggtgctgggtatgtgctgtccttctttgtcattggctggattcaatttggcatattgcttctttccacccattggctgtttgccatcaactgggggaatccggctgcagttattgtattagtgtcactttttctattgaccgttgtcggcattggattgatgattgcggccaacgtcagaacgccagaacagcagcttgcgttcggcaacttgtttgtcatcgcaacatgtatggtgagcgggatgtattggccgatcgacattgaaccgaaatttatgcaatccatcgctgaatttcttccgcaaaagtgggcgatgagcgggctgacggagattatcgctaacggtgcccgcgtcacagatattctcggaatctgcggcattttgcttgcatttgctgcgatcactttcgcagcggggctgaaagcgctccgagcctaaaaaacatctgccgtttaggcagatgttttttagcatgtgggtacattcgtatgggtgtagcctgaactgcggttaatccttatctatcatagctaaaattgattccagccaagaaacgtaatttttctcccgctccagcgctttcgttagcacaagatagtggccgaagtccggtgaagaaaatgacatcggctctgctgaagccataagcttttcatagcttccctgtaagtcagaaagcttggcctgtcgtttttgcagctggtctttgaacaaatcagaagcctcctggcgcgatagacaagaaatgaaataagccttcagcataaattcatccttcaccgtctcgggtatcggctggtggcggatcagccagtcatgcagttcctgctttccgctgtctgtcagggtgtacatctttttctccagctttgtgccctgaatcgttgtccgaaacgtgataaatccttcatccgtcagctttttgagctcagggtaaatctggctgtgcttggcgctccaaaactggccgagctcctctttaaaataactcgtaatatcgtatccactcaattcgccttttcgcaaaagccctaatatggcgtattttaatactctcatgctatcctccgtgtctggctgtttcgcaaaacagatgagccggtgctcaactgtgattctaactgcctattccccttattatagaaaagggaggaagggaacacaaccgggctctttggaaatgaagataaaaggtttgtcagaaggtatccgatttatctccgtcaatataaaagagatttaaatttaattttcagaaaaaatagtaaccatattgattttttatgtataataggaaattggtggtatgaacatgttaagggggaataaacgtgaaaaaagtacttatggcattcattatttgtttatcgctgattctatctgttttagccgctccgccgtctggcgcaaaagctgaatcagtacataatcctgtcgttcttgttcatggaataagtggtgcatcatacaactttttcgctattaaaaactacttaatttctcaaggctggcaaagcaacaaactatacgcaattgatttttatgataaaacaggaaataacctaaataacggcccgcagcttgcttcatatgttgaccgtgttttaaaagagacgggggcaaaaaaagtagatattgtggctcatagtatgggaggcgccaatacgctgtactatattaaatatttaggcgggggcaataagattcaaaatgtcgtaacgcttggaggggctaatggtttagtatcatcaaccgcgctgccgggtacagatcctgatcaaaagatcctctatacatctatttacagtctcaatgatcaaattgtcatcaatagcttgtctcggttacaaggagcgcgaaacatccagctttatggcatcggtcatattggcttgctctctaatagccaagtgaacggctatatcaaagaagggctgaatggcggaggcctcaatacaaattaatatcttcaaaaaacaacctgctgtctccgttacagtgggttttttcgtctgagaaagccatagggtcttatgaccttagtctatcatgcatacgtcaatttatgacatcaggcactttttcaaatagagcggacatgttaaggtacaaccatcgatttctatcaatttgaaataaaaggagcgctgttatgcaaattaaagaaatttttatgatccgctgcatttcgtgcttaagtgtcgtcttgctccatatcatttcaatggtcctgatgcttcaggcagaagctcttgcagatatttctcacactgttgattctttccgcacactcctgatgttcagcacgcccgcttttattttcatctctgaatttttactggcccgttcttatcctgatggggtgcctgacggttttttaaagaagcggggaaaagtgatttttgttccttttttatttatcgcggccatcgatgcgctgctgatgaccagtgcgatggggggagaggtaacctttctcgcgtttgtgcaaaaatatctggcgaacgttttcttaggaaactttatcggatacttcattctcgtcatctttcaattttacatgctgcatatgatgtttcatgagtacttgaaaaaagcatcgccgaaatgggtgctgtctatctcatttgtggtgacagccgcttatttaggctatttctccgcagccagcccggctcctgcttctgaagagggaggggcatttccgttcttctgggttccgttcgcaggctggcttttctacttttgtctagcctactattgcggaaaagaatacaagcgttttttagcgctgctgaaccaataccgctgggtggtgtacggcggcgcaattgcttccggggcgctggttgtcactgtttcttatgtgggtgaaatcggcatgatcagctcgaagcggcctgatatcatgctgtattcaacaagcatgattttcctgtgttttcacttgttttccaaaatgaagcatgtgccgaaaatcatgatgtttatcagcaactattccttttcgatttatctgcttcatgcctattttatgattataggctacgtgttgcttttgaatatgcccgacattcctgccgtaccggctgttctcctgttgtttgccgtgtgcacagccggcccgattatgacttcatgggcgctgaataagttcaaatatgggtatttatttgtggggaaaatttatcagccaaaacagaagaaggtaacagtcgaagtgcgtgatcacgcagggtgaaaaacaagcggcaggggggatcctgccgcttgttgtgtattaaaacatacagtatacacaatctttttcttgtaaaataaaggagaagagtgaatagaagggagaacattcatgacatcagtcaatctaagctacccaataggagaatacaaggcgagggaatccgtatcgaaggagcaaaaagataaatggattcaagtacttgaagaagtgccggcaaaattgaagcaagctgtagagggcatgacggacagccagcttgacacaccgtaccgggacggtggatggaccgttcggcaagttgttcatcatctggctgacagtcatatgaacagctatattcgttttaaattgagcttgacggaagagacaccggctattcgtccgtatgatgaaaaagcatggtcggagctaaaagactcgaaaacggcagatccgagcggctcactcgcgcttttgcaggagcttcacggaagatggacggctctgctccgcactctgacggatcagcaatttaagcgcggattttatcaccctgatacaaaggagatcattaccctggagaacgcgctcggcctgtatgtctggcactcacatcatcatatcgctcatattacggagctttccagacggatggggtggtcttaacgcttttgccggcggaaagccggaatactgatagcagcaatcaccagaagtgagatcacagcagccgctgcatataactgatcatagccgctggcgacactcgcatgaatggcgtcgcttatcgcggttttgacttcaggaacgggaatgcgttcgatttgttcttgtaaagaagaaacatcagaactgtcgatctccggaatcatctgcatcgccttttctgaatatccgctgtccgataagcggctgttgatctcatcacctatttggtcaaacccggctgtgataaaacctgcataaagagtaggcgccaaggtcagtccaatttgccttactaatgaaagcgtgccaagagctgtacccttatttgtttttgccgcttctgatacaaggacgttcagcggagcgcctaacagaaagccaaaaccgatcccagctgccacacttgcgatcataaactcccatttttccgtcacccagaacggaaataaagcaaaccccgcacatgagatgattcccgaaagaataacggtttttacaggacctttttggtcggtaagcgctccgccaagccaagcgccgattccggaagccaacgcaagcggtgtcatccaatagcctgcttttgcggcagggacacccaaatactgttcgacatatgacgggataaaaatgactgccgccaagagccccccggataacaaaccgatgataagcgtgcgctgaaacatatggtttcgcagcagagaatacgccaaaatgggatcgcctcctcgcatttcaactctcttttcatacgagataagcgctgcaaaacagagtatgccaaaaataatacatccataaacctccggattccccaagctgtgtaagagatttgccccgtcaagattggtcatgccgtacatcacagctaaaatcgacagggacaaaaggaagattccggccgcatcgaggcgcttagcctcaggtgcttttgtttccgcgataaaacatgcgccgaaaacaaccaatagcacggcaatcggcaaattaatcaaaaacagccaatgccaagacccggtccaatcaagcagaaagcttccgatatttggcccgagcacagcggccatcccgttcattgcgccaagcagcccaagcgccttcccttgtttttcctttgggagggtcgcgagaatgtgagagctgccgatgatgaaaatcccgccgcctccaagcgcctgaatcagccgcgatatcagaaagagcgggaagctttggctcaaagcaacaagcaaagaaccaagtccgaacaggcaaacctcaatgagaaagagtttttttctgccgtagcggtcggaaagctttccgacgattggcacactgacgctaagaccgagcgtataaagggtaatgccccatgatccccaggaaggggaaacggaaaacgactcgtttatcgttgttaaggcagctgaaataattccgttatctagcgcagccataaatacaccaatcgtaaacaggctgatcgcccacttttggcctttctgctctgttaatgcttcagacatattcatcaacctcctttttattcactcaaagtatattattcattttaaatgaactaaatgtcaaataaaaaaagcctgctcccgcagtttgcggatgacagacttacagatttattcttttttcgctttctctaatgctcttgaaaggatagacagcccttcggaaaccgcctgcttttcttcaggggacagcagctctaatgaacgcttcaatttcaggtggcctttttcatacaaaccccggaaaatatttttcgcattttctgtcaactgaacaactacagagcggcggtcctcttcagaatgtgagcgtttgacaaaccctgatttctcaaggcggtcaagcagcccagttgtattggacagggaagcccccattttttcagcaatgtcgctcactttcaatgttccatggttgtttaatagcatcagcactttcatttgcggcatgctcatatccagcttcatccactcggacacatcaccgaggccggcggaagttaagactttcatatagagcacccatatttcccgttcctccgatgaaagaatgttttcgtttaatactgttgtatcgtgtaaattatattccatttcatcacttcctcatcattcactcctcttaccatattactcgattttcactcctgaaagaaagtgagcagaaaccgcatgcgggactttgtccgaaaaataacggtagtgtataatgagttggagattattgggggagaggatcgaactagaatatgattggagagaccattgctgattaaaaagaatgctttatcaatattaaaaatcgtttttcctattgctgttttgctatttgttatttatcaatcgaaaaaagaactgacaaatctgtcattcaaacgtacgctcatggtcatcaacggactggaacgaactgacttatttatgcttgtgttgatcggcttgctggctgttgcggccatgtcgctgtatgattacgtcctgaaatactcacttcgcctatcgatcacaaacggaaaagtattcagggtttcctggatcgccaattcatttaataatgtgctgggcttcggcggtttagccggcgtcgggttaagaatgatgttatataaggagcatacgaaagaccataaggcactcgtgaaaggaatcgcctggctcacatcatctatgctgctcggattatctgttttcagcattttcgtcgctgcgagaatgctgccagtggatgaagtgattcatgaaaagccttggctatgggcggtcgttatcggttttgcgctgatattgccgctgtctttggcggtgtccaaaataaaagaccgcaaagctggggacgaagagaatgcggacaaagtgaaaaatccgattttcgcatatattggagcttcagttgttgaatggctcatggccgggatcgtcatctattttgctttgttcgctatgggcattcatgcagatatcaggtatgtgttcggggtgttcgtcattgcggcgatcggaggaatgatcagcctcgtgccgggcggcttcggctcgtttgaccttttatttttgctgggaatggagcagcttggctatcatcaagaggccatcgttacttctattgtgttgtacaggctcgcctactcatttatcccatttatcttgggactgttctttgccgcaggcgacctgacggaaaatacaatgaagcggctcgaaacgaacccgcgcattgcaccggcaattgagacgacaaacgttctgcttgttgttcagcgtgcggtattagtgagaattttgcaaggctcgctttcccttattgtgttcgtagcaggtctgattgtcctggcctcagtttccttgccgattgaccggctgacggttataccgcacattccgcgcccggcgcttttgctgttcaacggcctgtccttaagctcagcgctcattctgctgattctgccgatcgagctttataaacggacaaaacgttcctatacgatggccattacagcgcttgtcggcggctttgtgttcagctttttaaaagggcttaacatcagcgcgatattcgtattgccgatgattatcgtattgcttgtgctattgaaaaaacaatttgtccgcgaacaggcatcctatacactgggacaattaatattcgctgtggcgctgtttactgtggcgctctttaactacaatctgatcgcgggctttatttgggaccggatgaagaaggtgctgcgtcacgaatatttcgtccacagcacctcgcatattacacatgcaaccatcatggcgatcattattgtgccgctgttcttcttgatatttacagtggtctatcataagagaacgaaaccgatcggagagaaagctgatcctgagcgtcttgctgcgtttctcaatgaaaaaggcggcaacgcgctgagccatctcggttttcttggagataagcggttttatttttccagcgatgggaatgcactgcttctgtttgggaaaatcgccagaaggctggtcgtgctcggcgatccgtctggccaaagagaatcattcccgctcgtgctggaagaatttctgaacgaagcgcatcagaagggattcagtgttttgttctatcaaattgaacgagaggacatggcgctgtatcacgattttggctacaacttctttaaattgggcgaggaagcatatgtagatttaaatacatttaccttgactgggaagaaaaaagccggccttcgggcaatcaataaccgctttgagcgggaggagtatactttccatgtggatcatcccccattttctgatgcgtttttggaggagctgaagcaaatctcagacgaatggctcggctcgaaaaaagagaagggattctcgctcggattttttgatccttcctatttacagaaagcgccgatcgcctatatgaaaaatgcagaaggagagatcgttgcattcgcaaatgtcatgccgatgtaccaggaaggagagatatcggttgatctgatgcgctatcgcggcgacgctccaaatggcattatggacgcattgttcatccgcatgtttttatgggcaaaggaagagggctgcacgtcttttaatatgggaatggcacccttggccaatgttggcactgcctttacatccttctggtccgaaaggtttgccgctgtcatttttaataatgtcagatacatgtacagcttcagcggcctaagagcctttaaagaaaaatacaaaccggagtggcgagggaaatacttggcgtatcggaaaaacagatctctttctgtcaccatgttcctcgttacacgtctgattggcaaaagcaaaaaagactccgtctaataagacggagtcttttttttatttcgtttttaagaagtaggtttcaatatcatcaagcagatagtttgcggctttaattccgcctgcggttgtccacacgacgtcatcgacttcatgtgcattacctgacttcacggcctttaggtttttccatagtgaactgcttgtccactgattggcccatttttcattttcctttgcattatcggctttataagtgaaataaaacagcacatcagcatccatatcaggaatagattctttactgtcggttgagaacgtaaattggtccttttgtttcttaaacagctccacttgtttttcagggcgtttgaagccaagctggtctaaaataatcccaggaaatgaatcggtataatagattcttgactcaccggataaaaagcgtacgacagaaacggttttgtttgtctggtcgcccagcttgttttttaaatcagaaacgcgtttatcaaaatcggcaatgacttccttgcttttgtccgccttattcaccgcgttggcgtatagagtcaggttatccttccagttcccggccaaagattcagcaaaaacagtcggcgcaatcgcatttaactgatcataaattttctcctggcgcactttgtttccaataatcaaatcaggctttaattctgcgatggcttccacattcggttccgtttcaagaccgacgtttttaacacctttcatgtcatctttcagatagtcataccacgggtcgcccttccatgactttacggctccgaccggcttaatgccaagcgctaagagcgcctctgttccttcattagttaaaacaacaatccgttttggattggcggggatgttgtctgatgtccccattgcatgtttgaccgttcttgttttgctgcttgacccctcgctgttgcttgaactttctgaactattacaggcagaaagtaccataaaggccattaaaaatacgaatagcatgctgatatgctttttcatctttttcctcccaatattgaaattcattatcatttagatcataataagcagtgttaagagtgtcaatccctaattgaggattattctcaaaaacaaacattacatagtaaataactaggagaatattagatcatgatctgcaaaaaggcatcttcaaaatggattgtgttagtatgtctgattttcattttactggcggctgtctgcgcaagcgtcgtgtatggctatacaggtacgtcatggagacaggtctatcaggcgtttacttccttcaacggaacaaatgagcatgtcatcatcaaggatgtcaggcttccgcgcgctttggttgcgacagtcgtcggcgcctcgcttgcagccgcgggcgctctcatgcaggcgctcacaaaaaatccgcttgcgtcaccggggattttcgggattaacgccggtgcaggtttttttattgttgccggatcgttttttctgcatattcagtcacctcaggcgctagtatggagctcgtttcttggggcagcatttaccgctgcgatcgtctatgcagcaggctcgcttggaagagaaggactgacgccaatcaaactgacgctggcgggagctgccatggcagccatgttttcttctctgacacaaggcttgctttctgtcaacgaactcgagcttgcccaggtgcttttttggctgactggctctgtgcagggccggagtctggatctgttgatgacgatgtttccatatgcagcggcagcgctggtaatctgcttctttctcggccaaaaaattaacctcctcgttatgggagaagatgtggcaaaaggactcggccaaaaaacgggcctgctgaaatttgtgatggcgctttgtgttgtcatgcttgcagggtccgctgtcgccattgccgggccgatttcttttatcggcatcattattccgcattttgcccgctttgtcgttggtaatgattatcgctgggttctgccattttccgctgttttgggtgccattttgcttgtttgcgcggatatcggtgcgcgatatatcattatgcctcaggaagttcctgtcggggtcatgaccgccatcatcggaatgcctgtgtttgtgtacatcgcaagaagggggcgaagctatgaaacttcgttttggcgttactgcggctgaaaagaaagcatggatcgtctttttgattttactgggttaacagctgcggtactcatcataagcgctggtctcggacaaaggtttattcctccctgggatgtagcaaaaacattctttggtgcaggttccaagctggatgaactgatgatcatgtcgttccgcatgccaagaattttgacggctttatgcgccggtgtctgcttggcagcggcaggcgcgatattgcaggggctcgtcagaaaccctctcgcatctccggatattatcggaataacaggaggagcggcggtagcggtcgtgcttttaatgatgttcttctcagaccgcagcagttcacttacgatcagtctgtcatggcttccagcagccgcatttatcggcgcatcggctgtcgggctcatcgtctatttactggcatacaaaaatggcgcctccacatttcggctggtgcttatcggaatcggattttcaatgtcggcgcaggcgatgactaccctgttgatgatcaaaggcccgatttaccgagcatcacaagccaatgtgtatatcactgggtcagtttatgggtcaaactggcagcatgtaaaaatagctattatcttatctgtcattctcttattcatttgttttgtcgcgctaaaaaatatgaatatacaggtgctgggtgaagatattgcggcgggtgcaggaagcgctgtgcagcgaaatcgttttttcttgctacttttgagtacggctcttactggttgtgcagtttcagttgccggcacaatcggttttgtcgggctgatggcgccccatattgcaagacggcttgtcggctcatcttatggcgcgctgctcccagcgtcggcacttattggagctctgctcgttttaacagctgatatcgtcggcagaaccttatttgctccggtggaagtgccggccggcgtctttacagcggctatcggcgcaccttattttatttatttgctctataaaacaagaaattcttaatcgttacacccattttcttaaaaaagaaaatgggtttttttgataatgactgaagattcgtaattatttttgctatactgacagagacattgataaagaaagggcggcagatgaatgaaagaagcagaggtattaaaatatgaagcatttacaagcagtcccggcaaaggaaaccccgcaggcgtcgttttgcagggagacgattatacggaagacgagatgcagatcatagctgagcgtgccgggtattcagaaacctcctttatccgaaaaagcgagtcggccgatcttgaactccgttactttacacctggacacgaaatgaatttgtgcggtcatgcgacagttgcttctctttacgcattatgtgagaaaagaatgctggagagcggtaaaacgtacagcatccaaacgaaagcgggtatcctgcctgtgaagatttctgaaaaagatggccgtattcatatcacgcttgaacaggcctctccgcaattcaaaccatttacaggcgatcggggaaaacttgcgaccgcactgggtatcaccgatgaagattttcatgaagaccttccgattgtgtttggcagcactggcatatggacagccatcgttccgcttaaatcattggaggcttccaaaaaaatggtgccagataacaaacaatttccggaagtgttaattgatctgccaaaagcttcagtccatccgtttacctttgaaaccgttcatcccgacagcgacctgcacggacgccacttttcatccccgtattcgggaacgattgaagaccccgtgaccggcacagcatccggcgtgatgggggcttatatgaaacattatggaaatgccgagcagcataaatttatcattgaacaagggcaggaaattggaaaagacggaaaagtggagatcgaaatgaacgaagccggcggccatgtgaaagtgaacatgacaggaacagccgtttactcagaaacccgtattcttaaattctaatacggatgatggtttacaaaaagatgcactttccgttattattatgaaatgataatcattttcaattgcataggaaggtgagacggtatgcctcaaaccgaacaaatacatcagcattcagtactgcgggacatcatacgcagcagaagatcgattcgaaagtttaaacaagagccagtaccttcagcagtcattcttgacatgcttgaaacggcaaaatatgcgccaaatcacagagtgacagagccatggagatttatttacgtttccagtgagacaggtaaagcgaacctcatcaatacatttgcagcgttctctaagaaatccaagccggatatgacagaggaaaagcttcaaaatttcaaaaacacacttgggcgcgttccgggatttctgctcgtcgtgtttcaggaagatgaaaacgaaagagcgcgggacgacgattttgcggcaacaagctcgttgattcaaaatctccagcttcttgcttgggaaaaaggaatcggcatggtttggaaaagcggaaaaatcctttatgacaaagaagtccatcaggcctttggtttgcaggataatgagcgtttcgccgccatcatacaaacaggttatcctgacgaggcgccggaagtgaaaaaacgcacaccgatccgcgaccggtttactgaaatgtaaaaagccccttgtctcaaacggagacaagggtttttcattaacgagatttctttttcgctctgttgtcggctgctttcgcacgctcttgcgcttcgcgatcatctgcatcagcaagctcggttgaatattcttcgtaaacgccgtcagtttccctttttaatgtatcgggaacttgtggaagcttttgtttgtttttatcacggtttttgtggatatgatttctgcccatatcaaattccccctaaaaagtgatatcaaacaaatatagtatttggttttaaggggttatgtattcctacttccgcttagcagctttttccgcttttttaaattcgcctgaataaagaacttcctgcatttttttcaggttggcgccttgctggtgcttctccctctttttttccataaaaaggacctccttcaaccatgttattcttaaggttgacgcttcctgctgtttttatacagtctttcggtccgctatcagctgtgagagtgcaaattcaagatccgaatatgtaaaacgaaatccagaggttatcgcttttttaggaagagcgcgctgtcctttcacaatcaaaagactcatttcacccaatgcttttgataaaaagaattccgggacggggagccaatgcgggcggtgcttcacccgtgcaatcgcttttccgaattgcttcatgtccacaggattgggcgcggtgacattcattgggcctgagatgccggcattttccaccgcatatcggatcatctgggccgcatcctcgacatgaatccatgacagccactgccttcccgttccaatcgttccgccggccagaaacttataggggagaaccataagcggtagagcacctttttctccaagcatcacgccaaatcttgcataaaccgtccggatgcccatcgcttcaatatgctgtccttccttttcccacaggtgtgcagtatggctgagaaaatcctcatctgacgttgcagaatcctctgtgaaagttttctcaaggcttgtcccgtaaatacccacggcactggcttggatcaatgtcttcggcttctccttctgtttctgaataagccgctgcacttcacgcgtcgcattgatacggctggagagaatgtgctgcttcgttttttctgtccagcggccaaaaatcgattttcccgcaaggtttatccagacatcaatatgaggaagttcctgctccggggcggctccttccgtcagccattggacatatgtcatatttttttgttcagtttcccttgcgtttcttgataaaatataaacatggtgtccctggcggataagaacgcctgtcagatgctggccgagaaaaccggttccgcccgtcattgcgatattcatgaacatctctcctcatcgttctaataaatatactttacctcattgtaataaaagaaaacgcgtttcaggcctgagaagggagattaagatgccgtttattacaaaaatatcaacgcaaaaaaagaatacggaacgcttcaatatttttctggatgataaatacgccttcagcgtggacgcggatgtgctcgtgaaatttgagctcaagaagggaaaagaactcgatgatcttgacatcattgagattcaatacggcgatgaagtgaagaaaggcttcaaccgtgcgcttgactttttatcctatcgaatgcggtcgacgaaagaggtcgaggaccacttaaagaaaaaagaaacctcgccccccgtcattgcggaagtcatccataggcttaacgattacaagtacttaaacgaccaggaatttgcctcagcctatgtcagcactcacaaaaaaacaaacggaaaaggccctgatgttttgttcagagagctaagagcgaagggaattgatgccgatacaattaaggaggcgctaagttccttttcctttgaagatcagacaagagaagcggtcaagcatgttgaaaagcttctcaaaaaagataaaaagctttcgacgaaagaattcaaacagcgcgcccagctgcagcttcagcgcaagggcttctcatttgatgttatcagcgcggcgatggatcagattgaatatgaaaatgatgaagacacagagaaagaagcgctgcgccttcacgcggaaaaagcgtttagaaaataccgctatgacggctcatatgaaagcgccatgaaggtcaaacaatttttattccgcaaaggattctcactcgatttaatcgagcaattactgcaggaagaggagtactgaaatggagaaacgatacagtcaaatgacacctcacgaactcaataccgaaatcgcattactttctgaaaaagcaagaaaagccgaacagcatggaatcataaacgaactggcagtgctcgaacggaaaattacgatggcaaaagcatatttgctgaacccggaagattactcaccgggagaaacatatcgtgtggaaaacactgaggacgagtttaccatcagttatttaaatggcgttttcgcatggggatacagaacctcttcccctcagcaagaggaagcgctgccaatctcagtattgcaagaaaaagaataaagcgtaacaggaggctgattatcagcctctttttgtttgcagcacatttacacgaattcttaaagaaaaaatcattgaattcacttgaaaaatcttttaagatgaaactcgttgttttttaaaatcaaaggaggcgatgacgttgagtatcaaaaacccatctgtaaaatttattatatttgttcttatgatttgtacattttcaatcggctatacagaatacgcggtgatgggtattttgacgtcgattgccaatgactttcatatacaggtttcatccgcagggcttcttgtcacggcttatgcggctagcgtttgtttgacaggaccgctcgtcaccatcatttccgtcaagcttccgagaaagcctgtgcttcttgggctgatggcggtttttatcctttccaacctgatgagcgcactggcgccgaattttgcggtattggccatttcaagaattttatctgcgtccattcacggcgctttcttcgcgattgccatggtattcgcaagtgaaatggttccgccggaaaagcgtgctgcagctgctgcttcaatgaacggcggactgacagtggctctaatgcttggtgttccattcggctcttatctcggagatgtcctgaattggagagcggtgttttccatcattacggctcttggtgtcatcggatttttaggccttatggctgccgtgccgaacagaaaaccaaaagtgatcccaatgcttatgaatgagtggggggtttttaaacacaaacaagtgctgttttccttcgcgattaccattttaggctattccggtgtctttatcgcctacacctttatcgaacccattttgaggcattcagccggattcagcacggttggcattacaggtgctctctttgcgtatggattgggaggcgttgccgggaatttctttgctggaaaggtaccgctgcctttgctgactcggacgatgatcggcgtaatgatcggtttaatcggtgttctggctgtatttccttacatcgccatttacccggctgcagccattgtggcaacgttcctattcggggcatgcgcattcggcacgccgcctcttctgcaaacaaaggtcatttcctcatctgagggcggcacaaccattgccgcagctgtcagcgtatcagcatttaaccttgccaatgcccttggtgcatggatcggcggaatgattttaaacggaacaggctcttattcctggctgtttgcaggaggtgcgcttatgaccgcatgcggacttgtgctttctaccttcgcacacttatcagaaaagaagagcgtctacgaatatcaagtcaataaagggtaaaaaacagctgcagtgtatgcagctgttcttctttaccgtttgcctgaggctctcattctttcttgaggatgctgattgatagatccgtcagcacgctttgaagcatagtcgtcctttgctctcggttcaccctgaaatttgttttcgttttcgtaaggaaatcctttttctttatttcggaccatgtcatatccccctaggttcgagatcaaaaagttgcgtcttttcagatgaagacgtaaggttagtatatggagaacaccacgtaataaagcgttatttttttcctgaagaaaggagactgcacacatgaatatgtacattgagaaactgactaatctgcttctggaaaagaacgagatgatcagctatatacaggcaaaaacgtgggtggaattgttatggagcgatttcgaagcaacctacgcaaaagccggacacgcctatcaaggtgaaaaaatgactgaaaaaatcgtcacacaatggattgaaaactatggcggccagctccacctttttcaaagctcccgtaacgacgtgaatgattacttaaatcaaagcagaggccttttgcattaaaaacctgccgttaacgaccggcaggttttttcattttcttaaaattaccttaacaggaagaaatcataaacaaaacatgtttcaccagcctgtcaatcagggaataccacttatatcttgtcaaaatgcgaggaggagctttatatgaaaaagaaacaagtaatgctcgctttaacagctgccgcaggactgggtttgacagcacttcattccgctcccgcagcaaaagctgcgccccttcacgacatatctgtcagcatgccatcatccgatacttacatcataaaagcaggaaaactgaatgtccggactgagccaaatcatgaaggtgatattctcggcactgtatcatcagaacaaaaggtaaaagtcgataggttcgtaaatgccgattgggctcaaattcatttcaaaggaaagaaagcatatatttcaactcactttttaatgaaaaccgcaagccaagcgaaaacaacgaaacagacagccttctatgcaccgacgcccgaaaatggaaaagctaaacagctctcatctggaacagaggtgacaatacttgggtggggattcagtgaaaacggcggatttgacttcacttgggggttcgtggattatggcggagttaaaggctatattcacacaaaggatttacaaatgcgataaaaaggcaggccgaggcttgtctttttgcctatgcatgaaacatttcttctttctgcacgtaacaatgagaaaggagatgatgatatgacgggtttagtcggcggagggcttatgatcattgcgggcatactgatcaaactgtttcctcccaaatcgatcaacagtgtgtacggatacagaacgagacgctcaatgtcagatcaaagattatggaatgaagcgaaccgttacagtgcatcattaatgatcctgtcaggcttggtgattgcgggaatgggtttgctgctgggatcaaacttgtttattcttcagcttatcctgctgattgccgccagtgtcataacatttatgctaacggagaaaaggctgaaaatcatgacgcacagtcaaggaggagatagaagtggacggagttaaatgccagtttgtcaatacgaacggaatcacgctccacgttgcagccgcaggaccggaagacggcccgttaattgtcctgctccatggatttcctgagttttggtacggctggaaaaatcaaatcaaaccgcttgttgatgcgggttaccgggtcattgctcctgatcagcggggctacaatctcagtgacaaaccggaaggaattgattcgtatcggattgatacattaagagatgatatcatcgggcttattacgcaattcactgatgaaaaagcaattgtcatcgggcatgactggggaggggctgttgcatggcatttggcttccacacgcccggaatatcttgaaaaactgatcgcgatcaatattccgcacccgcacgtcatgaaaaccgtaacgccgctttatccgccgcaatggctgaaaagctcgtatatcgcatacttccagctccccgatataccggaggcatcactaaaggaaaatgattatgaaacattagacaaagcgattggattatccgaccgtcccgcgctttttacatccgaggatgtcagcaggtacaaagaagcgtggaaacagccgggcgcactgacagctatgctgaactggtacagagccctcagaaaaggaagcttggcagagaaaccctcttacgaaacagtaccttaccgaatgatctggggaatggaagaccgctttttgagcaggaagcttgcgaaagagacggaaaggcattgcccgaatggacatctcatctttgttgatgaagcttcccattggattaaccacgaaaagccagccatcgtcaatcagctgattttggaatatcttaagaaccaataagctaaaatttctctccatccgtctgtcataatggcagactttttctgtgcgtttttttcatagtctgttttaaacatgacaaaataacattaaaaatcatgaatgtcaccataaaattgtaacaaaaaacaggtttaaacgactttaaaaaaaggaatagccttactgaagatttgtgtaaaactcccctaaggcaatacttaaaaagaataataaaaagaaggtgccttaatgaagcaaggattaatctcgattattatcccgtcttacaatgaagggtataatgtcaaactcattcatgaatctttaaaaaaggaatttaaaaacatttattatgactatgaaatattcttcataaacgacggaagtgttgatgacacgcttcagcagatcaaagacttggcagcgacgtgcagccgggtaaaatatatatctttttctcgaaactttggaaaagaagccgcaattttggcgggctttgagcatgttcagggcgaggcggttattgtaatggatgccgatctgcagcatccgacatatttgctgaaggaatttatcaaaggctacgaagaagggtatgaccaagtcattgcccaaaggaacagaaaaggggacagctttgtccgctcactcttatcatctatgtattacaagttcattaataaagcggtggaagtcgatttgcgtgacggtgtcggtgacttcagattgttaagccgccaagctgtgaatgcacttttgaagctgagcgaaggaaaccgcttttcaaaaggccttttttgctggattggctttgatcagaaaattgtattttatgaaaatgtcgaacgaaaaaacggcacctccaaatggtcgttcagcagtctgtttaactacggaatggacggcgtcgtttcatttaatcataagccgctgagattatgtttttatacaggcattttcatcctgctgctttccatcatttatatcattgccacattcgttaaaattctgactaacggtatttctgtgcctgggtatttcaccattatctcagcagtgttatttctcggcggagtacagctgttaagccttggaattataggtgaatatatcggccgaatctattatgaaacaaaaaaacgcccgcattatttgatcaaagaggcgaatatcccgaacaaagacctgcctgaaacgaacgaattaaaaagcatgcggcgtctgacaaaaatgcactgaaaataccaagcgccattggcagtgctttttttgcgtgtctattatcttaaaagcaagactggagaatttatatgaaaagaaaacatatcatgatctatgcggccagtttgctggtgtccgttctggcacacgctttttttgtgaaagaatgggcggaaggcaggtatatgacaggtccgggtgacgggcttgcgcaaatgatcgtatttaaaaaattattatttgaccaatatacacacgggaattttttctacaattattcattcggacttggcggcggcacattcagtcagctcggctattatttttccgcgtcttttctttttcttgctgtgtccgccgctgtttggctgcttcaagccgtccagctgatcggagaagcggatacgcttttttgggcagagtcagctgttttcatcagtatttttaaattgagcttgatcatctttacgtccgcttctgtttttcattatcttcttaagcacagggcggcatcgttcacgggagccgtgttatacggcgtctcaattatttatttccgtcacgaagcgtattgggaatttttcaccgatacaatggtttggcttccgctgcttgtgcttggtgcagaaaaaattattagagagcggcgtccggcgtggtttatcgttgcgtgttcgctgacgttaatcaacaatttttactttgcatacataaaccttatattcatcggaatctatgtgctgttcagatggctgatccgtttggaaccacatgaagagaaaagatggattcaaatcagattatttctcgtttcaggcttcatttcttttggcatcagtgcggcggcgtttgtgccggtagtatacggttttttaaacaacctgcgccctccatacagccagaaaatagagtggctcaatttcgatgataatatcttattttcgagccggatcatcattgtgccggccgcttttctgctgtttttgtttattatttctttttacaaaaaccgtgtgtttcgtctctttgccgggttgagcctgctgtttattctgtttcatttcagtccgtatgcggcaagcgtctttaacggtttttccgccccgcaaaaccggtttgaatatgttctggcctttaccattgcgggagcagctgcggctggtttgtcacagctgtctgaattgaaacggaaagaactgctcccggccgcagctgtcgtcctgcttctttacttgtatcatattcaaaggtataagctcgatatatggaagcctgcgaatgaaagtattctattgctcttactcatgacaatcgcagccttgtttgctgcagcttttgcgaaaaaacgggcaaaaatggctgtgtacggtataatcattctttcttcgctgtttgtcgccaactcctatcaaaaatacgcgctctcagaaggcggcgatttggatagtgtgacaaaagaatatcttacaagtgaggaatacagagggcgggaatcatctgagctcatcagacgtttacagaaggaagacgatgatccgctcatgagaatcgactggatgaacggggtccgcaataatacgccaatcatttacggatttaatggcttcagcgcgtattccagcattttaaacaaagatctgctggccttctattggaatgatttaagcatcgatatgggcagggaaagcgtcagccgttacgcgtcattgggagacagggcgaatttatacagcctgctttacggcaaatattatatgaccgaaaaaacaaacgaagccagcgtcccgtacggattcaaaaagcatttagaaacagagcattatgcagtttatgagaatcagtacatgcttccattcgtcaaaacagcggatgccatatacagcgaaagtgagctggaccgattgcccgctcttgcgaaagaacaggcgatgctgaaaggaattatattaaaagatccatcaggaaaaacggagcagacaccaaaaccgtccaatttgatcaccaagtcggacatcaccgcaaaacaagcccagtatcaaaacgggctgctaaccgtaactggagaaaacggaggagagctgatcatcaccccgaaacagccatcatccgctgcgggagactactatgtcagcttttatttgaaaagcaaagcaaaagacaaaggatttacgttaaaggtaaatgattatgtcacaacaaggaaatcgaacaaatcgatctataaaaccggagtaaataatataacggtaagagtgcctaaatcaggccatatctcaatcaatcttccgaaaggaacctatgagctgagaaacatagcgctctatgaagaaaattaccaaacgctgaaaaacgctgtaatgcaaaataaaacagagaaagcagacaaactgaattggaacaaaaatcgactgacctttgcctatcatctgtcaaaagaccagtacatcatgcttccgatcccatatgaaaaaggctgggagctgaagatcaacggaaaaacacagaagatcgaaaaagcggattatgcttttataggcttcaaggcgcaaaagggagacaatcacattgagctgacttactatccgccatacttcaaaatatcggcggtcatatctctcgtcagtctgctgtttgctgttttctatataagacgtaaaaagcccggctctatatagagccgagctttaattttttctgaagtttttcttcgctgaatatccatcccgtataggacgaacgaatcgtgagatcatggccgatgtgaacaattgcgacaaacggataatggcctttgctccgataacgcaggtcgataaatctcacctcataatgatctttaaacgtatccacttcccaccggtataccggagaaaaggacagaaacgccgcaatgttatcatcctgctttgccgcatgcattacatcggtttcaggaacaggcacccgattaaatgtatccagaatcacgacatgtccttccatgcttcttcctacatagaaagcatgtgctgtcgtcactgcgattcgccattgcctgaatttcatcgttggagaaataataatgctttcgatctcatcatgaatcatctcatgaagcttccgtttaattctcagctgcatgatcaggcgcaccaagtagtagcctaccaatatgatatataagctgagaaacgtgatgccgggactcccgcctgcataccaaatcgcgatagctgctagatggctgataaaaataaacggatcaaacgtattaatcagcccgagcgcaacccattttttcgaaaatggacgaatggcttgtgttccataggcgttgaatatatcaacaaagacatgcagaacgactgccagcagtgtccacagccacaggtgcagaaaatcggcctgaggataaaataaatacagaatcgccgggatgatgacagaccaaaacaaaacggcgggaattgaatgggtaaatcctctgtgattccttatataaacagcattgtttttaagctttaacacagtatcaatatccggagcctgagagcccgcaagcgttgcgatcataacagcgtgagccattgccggatctgatccgacaacaggatcaagcgtcgcaataccgcccagtgcgatgcccataacgacatgtgtgcccgtatccataggtgacctccttgcaggatgatcctgcacattcactttgtaagaaattccccattttcatatacccaatttttaaactgattcaatcgttctcatatgtttccgctttttctttattactatttaatgtaacatattatcgtactgtgcccttagtgtacaacaaaaaacagtctaaagaaaagcggggcgcgaaagactggggagaaacacatatgaacgtacttgaagacaaattaaaacaaaaagacatacagcaatttcgcgatgatttaatctcatggtttgaacgagagcagcgcgttctgccgtggagagaggaccaagatccatataaggtgtgggtatctgaagtgatgctgcagcaaacgagagtagagacagtgattccttactttctccggtttgtggaacaattcccgacagtggaagcgctcgctgatgctgatgaagaaaaggtgctgaaagcatgggaagggctcggctattattcgcgagtcagaaacctgcaaagcgcggtaaaagaagtgaaacaggaatacggcggcattgtccctccagacgagaaagattttggcgggttaaaaggcgtcggcccttatacaaagggagcggtgctcagcattgcctacaataaacccattcccgcggttgatggaaatgtgatgcgtgtcatgtccagaattctttctatttgggatgatattgccaaaccaaaaacaagaacgatctttgaagacgccatacgagcttttatttccaaagaaaaaccatctgaatttaatcagggcttgatggagcttggagccttgatctgtacgccaaaatcaccctcatgcctgctatgcccggttcagcagcattgctcagcatttgaagaaggcactgaacgggagcttccggtaaaaagcaaaaagaaaaagcccgggatcaaaaccatggccgcgatcgtactgactgatgaagacggacaagtgtatatccacaaacggccgtctaaaggtttgctcgccaacctgtgggaattcccgaatcttgaaacacaaaaagggatcaaaactgagcgtgaacagctcattgctttcttagaaaacgaatatggcatacaagctgatatcagtgatctgcaaggtgtagtcgagcatgttttcacccacctggtatggaatatttcagtgtttttcggtaaagtaaaacaagtgtcggataccagcgagctgaaaaaagtatcgaaagaagagctcgaacaatttgctttcccggtgtcacatcaaaaaatctggaagatggcagtagaagcagccgccatctcggctgctccgtaaaccattcttaatcgtaagagacgcgcgtgccgtggctgtagtccgcttcattgcgcttcattccgccgcgcgcttcaatttcttgcgttaattcccggtattttgattggccttcttcgttcaaataaggcataatttgctgaaaggcatgatgaaaataagcgagttcactgttcttccaatcttttttggaaaccatgttcaattcgctcatatcacgtccgacatacataacagaagaccccctttaaagttcttgccattattgtttgtggaaataaaagaactatacgctacaaggagatgaggaaaaatggaacaaaataaatgtgcactcgtaacaggaagcagccgcggtgtcggaaaagcggccgcgatcagacttgctgagaacggctataacatcgtcattaactatgcacgcagcaaaaaagcagcattagaaacagcggaagaaatcgaaaagcttggcgttaaagtgcttgtcgtaaaagcaaacgtaggacagcctgcaaaaatcaaagaaatgtttcagcaaattgatgaaacgttcggcagacttgatgtttttgtcaataatgccgcttcaggagtactaagacctgtcatggaattagaagaaacacactgggactggacgatgaacattaatgcgaaagcattgcttttctgcgctcaggaagctgccaagctaatggagaagaacggtggcgggcatattgtcagcattagttcattaggctctatccgctatcttgaaaactacaccacggtcggtgtatcaaaagcagcgttagaggctttaacccgttatcttgccgttgagctttcaccaaaacaaattatcgtcaatgctgtttcaggcggagcgatcgacacagatgcgctgaagcacttcccgaatagagaagatctgcttgaggatgcgcgccaaaacacgccggcgggacgcatggtcgaaattaaagacatggttgatactgtggagtttctagtgtcttccaaggctgacatgatccgcggacagacaattatcgttgacggcggacgctcactgctcgtttaaaaatttttaaaaaagaggaatagctatacgatcacctgcacattctaatgaccgtggaggtgataacaatggctaactcaaataacttcagcaaaacaaacgctcaacaagttagaaaacaaaaccaacaatcagctgctggtcaaggtcaatttggcactgaatttgctagcgaaacaaacgctcagcaagtcagaaaacaaaaccagcaatcagctggacaacaaggtcaattcggcactgaattcgctagtgaaactgacgcacagcaggtaagacagcaaaaccaatctgctgaacaaaacaaacaacaaaacagctaatcactgaaacagaaaaaagcacttcatcttcgggtggaagtgcttttttctgtttgaaaaacgacaaaacttgtggaaggtctacagaatgagtcaaagggtttgctttatggagatcgaaatgattaaaggaggaaatgtttatactttcatcaggctgaaggaggaaccgatgaccgaatttgaaaagctggtaagtgaacagatgaaaacgatggataagcttctcgatctccaatcagagctcgaccgctgcaaacaaattgaggcggaactccggcatttggaaagggatgcaaggctgcgtgggattcaggctgaaattgcggtaaaacggaaacaccttgccgatatacaggatatgtttcaaaagcagacagagcaggtcattcgttcatatcgcagctcagaaaagccgtcttcctttgtgtagtgcaggaatgtgccattccccggccggaatggctcttttattttcatttttcaatttgtaacgttataataggtaaaagacgttgtcggtaagcaaatttggacatactaactgtagggctttatagaaagtaggggagaaatatgggctatcccaaggaaggagaaaccattcaaattcacagctataagcacaacgggctgattcatagaatttggaatgagacaacaatcttaaaaagtacagaaatgtgtgtcatcggagccaatgaccggacgatggtaaccgaatcagacggccggacatggataaccagagagcccgcaatctgttattttcacgcaagacaatggtttaatgtcatcgggatgctgagggaagacggggttcattattattgcaacatcagttctccgtttgcctatgatggcgaagcaattaaatatattgattatgacttagatgttaaggtttttcctgacatgacctacaatattctcgatgaagacgaatatgatgatcatcggaaagccatgaattatccaaaagaaatcgacagtattttaagagactacttaaatacgctgctccattggattcaccagcgtcagggaccgtttgcgcccgagtttgtcgatatgtggtatgaacggtatttgcgctatacaaaataatggttacgtaaaaacctgttgcggggtacaacaggtttttcacatgggctcacacacatcatgataaagagagagggggaatcaacgtgggggttatgaaacgctacatgcaattcgtcaaaccttataagaagcaaattttcgttacagtattaatcgggatcgtaaaattctccattccgcttgctctcccattgcttctgaagtacgtagttgacgacattattcaaggaggcggcacggccagtgacaaaaccacgtcattgttcacgattatggcgatcatgttcgccttatttttaattttgcgcccgcctgttgaatattaccggcaatattttgcccagtggactgccagcaaggtgctttatgatataagagctaagctgtttgaccatatacaaaaactgagccttcgtttttacgcgaatacaagaacaggggaagtcatttcccgagtgattaatgatgtagaacaaacaaaggatttcgtcatcacagggctgatgaatatatggctcgatatgctgacgattttgattgtaatctctatcatgctcacactggacgttaaattaacgctgatttctatcgtattattcccattatacggaatatcagtgaagtatttttacggccgtttacgaaagctgacaagggagcgctcacaggctcttgctcaagtgcaggggcatttgcacgaacgcattcaaggcatgcctgtcatcagaagctttgcgatagaagatcatgaacaggctcaatttaatgagaaaaacggtcatttcttagataaagccatccgccacacgaattggaacgccaaaacctttgcggtcgttaataccattacagatttggcgccgctcatcgtcatagcgtgcgccgggtattttgtcattaatggaccgctgacagtcggaacaatggtcgcgtttgtcggatatattgacagaatgtacaaccctgttagaaggctgatcaattcctctacaactttgacacagtcaatcgcatcaatggacagggtgtttgaatttattgacgagccctatgaactcactgacaaaccaaatgcgataaaggccgatcagattcgcggaggagtggagtttcaaaacgtttcgtttcaatatgagaaggacaaagaaaatattcttcatgatgtatccttaaaagtaaatagaggagaaactgtagctctcgtcggcatgagcggaggaggaaaatcaacgctcgtcagcctgatcccaagattttatgatgtaacaagcggcagactgctgattgatgggacggatattcgcgattatgaagcaagaagccttcgcaaccaggttggtatggtgcttcaggatacctttttatttagtgaaacgattcgggaaaatatcgcgatcggcaagcctgatgccacacttgaagagataatcgaagccgccaaagctgcaaatgcccatgaatttatcatgagttttccagaaggatatgagacccgggtgggagaacgaggcgttaagctttcaggcggacaaaagcagcggatctcaattgcgcgggtattcctgaaaaatccgccgctcctcattttagatgaagctacatcagctctggatttggaaagtgagcattacattcaagaagcgatggacaaactggcgaaggatagaacaacttttgttgtcgcccaccgtttatcgacaatcacccatgcggataagattgttgtcatggaaaacggcacaatcattgaaatcggaacccatgatgaactcatggactatgagagccagtacaagcatttatttaccattcaaaatttgaactaaaacatcaatcttatatccttttaacgaaggatataagatttttttgtgtataaaaaaacccggctgtttaaccgggttactcttctgtttctatttcgcagtctttcggatgatacgtttgaaaacttgtgataagtgtttctaaatgttcaagctgctcgcgatattccacggcgcttgccataatattgagcatgttgtaatcaataagctcctcatccgtattctgctgattttttaaaaatgactttgttaaaagctgcttataccggatgccttcttcaaccgcgtcatcatgcggcttgatttttccgacaaacctcatcaaaatccgttcgtgccagtaaagcaggtaatcaagttcttcagtcaatgtttcctgaaactcttccggcatatgatagatctcgttttccagacgatgcagcttcttcaatgtatcaagcgcccgatttgcagtaataatggcctgtctgaacaggacaagctttcttgatttcacataagtcgttttcttaaagtaacttctttcttctttatatagaagatatgtctgatcaagcttgatcattttttctttcagtttttcaatatcctctttcaaaatcgaatgctctgtcgactgccgcatggacaatctgatccacttcataatttcttcggtgttttcgacggtattatgaatcagctttgtttcgtacttaggaggcaaaaacacaaggttgacgataaaggaagaaagcacccctaagatgactgtgcttgttctgatcagcgcgaacattaaaaagtcgtcaccggcagattctaatatcgcaatgactgttacaagagcaattgaaattgtatgttcaattttaagtttcagcatgattgtaatgacaataactgctgttaacccgatcataatcgggctgggtccgaaaataaggccgaacactgtggcaatcacagctccgatgatatttgcttgaacctggtcaataataatgagaaaagagcggtaaatcgacggctggatcgcaaatatcgctgcaattccagcgaaaatcggcgcgggaagcccgatccacgaagccaaataaagggcaagtgtaatcgcaatcccggttttgaaaatgcgggcaccaagtttcattggtttgtgcgtgcattcctttctatagtaaattgtgtgacatagcaaatgggctaatccttaaaattcccggttagtttatttgctaaacaattaagtaatatacagggatcgatacaaatattcaagctatttttctagaaaaagaccaaaatcttacacgttgtttgattccataaaaaaaacaggagctcaaagctcctgttcaaggtatctgattctagtttttaagatgtttaaaagcatcctcgaccgctgcaagcgtgtctttaatatcctgctctgtatgtgctgtggtaataaaccaagcttcatacttagaaggtgctaaattaattccgcgttccagcatcagcttgaaaaacgtagcgaatgtttctccgtcactccgttcagcctgctcgtaattttcgactttctcatcagagaagtataccgtgagcgcaccttttaaccggttgaccgtaatggtgatgccgtgtgtttctgcgtgcttcaaaataccttcctcaagcatagcgccaaggtgatcaagcttttcatacacgcctttttctttgagcacttccagacaagcgatgcctgataggatggaagcggggttccctgccattgttcctgcctgataagcaggtcctagcggagctacctgctccatgatttcttgtttgccgccataggcgccaatcggaagtccgccgccgataattttcccgagtgctgttaaatctggtttcacctgtaagagatcctgcgcgccgccatacataaagcggaaagccgtaatgacttcatcgtaaataacgagagcgcctgcattatgtgtcaattcatttactttttctaagaagccctctttcggctccacgataccgaagttgccgacaatcggttcaacgagaaccgccgcgatttcactgccccatttatcaagagccgctttatagctatcgatatcattaaatggtactgtgatcacttcgtttgcaatgcttttcggtacaccggctgagtctggtgtgccaagagtagacgggccggagcctgcggcgacaagcacaaggtccgaatgcccgtgataacagcccgcaaatttaatgatttttgtccggcttgtatatgcgcgagccacgcggatggtcgtcataacggcttctgtacccgaattgacgaatcttactttgtccatagcgggaatggcttctttgagcatttttgcaaatgtaacctcgtgtttcgttggtgttccatacaatacaccgttctctgccgcttttttaatcgcttctgtaatatgcgggtgggcatgtcctgtaataatcggaccatacgccgctaaataatcgatgtatttgttgccgtccacatcccaaaaataagcgccgcttgctttctccattgcaacaggagaaccgccgccgactgctttatatgatctagacgggctgtttacaccgccgacaatgtgctgtaatgcctcattgtgaagttcaattgattttgtatgcaagaataaaaacctcctatatctccatgcgtcctttctattgtagcatgcttccgaacaagaacaatggcttcgggcttcagattcagctgagatggttgtaatctggacaagaattggatacgcttaataaaaaacatccggaggtaacgtaatgactatagaaatcggacataaagcgcctgatcttgagttaaaaggtgatcatggggaaacagtaaaattatcggattataaaggaaagtacatcgtgctttatttttatccaaaggacatgacaccggggtgtacaactgaagcatgcgattttcgggacagtcacgaaagcttcgctgaactggatgccgtcattatcggcgtcagcccggacagccaggaaaaacacggaaaatttaaagagaagcataaccttccatttctgcttcttgttgatgacgagcataagctggcggaagcatttgatgtgtggaagctgaagaaaaatttcggaaaagagtatatgggaatcgagcgttccacttttttaattgataaagaaggccggctcattaaagaatggagaaaagtaaaagtaaaggaccatgtagccgaagcgcttcaaaccctcaaagatatgtcggaaaagtaaatctctatgagcctatgcttacttttaccctgatatcaattgacaaattatcgtagaaagagttacactaattataaacattacaatgtaagaattttttttagaagagaggtgcatgacggatggctgcacatgaactaaaagaagccttagaaacgttgaaggaaaccggagttcgcattactcctcaacgtcatgcgattctggaatatctcgttaactctatggctcatccaacagcggacgatatatataaagctctggaagggaaatttcctaacatgagcgtagcgacggtatataacaatttgcgtgtgttccgggaatcaggtttggtaaaagagctcacatacggtgatgcttccagcagattcgattttgtcacatccgatcactatcacgcgatttgcgaaaactgcggtaaaattgtggacttccactacccgggccttgatgaagtggagcagctcgctgcccacgtcacgggcttcaaggtaagccaccaccgtttagaaatttacggcgtctgccaagagtgttcgaaaaaagaaaatcattaaaaataagctgaccgcacgaaacggtcagcttattttatttcgacattttctttttattataagactcatcaaattcttttccttctaatcccttatctaaagtcagcggctctcggcaatgcatgcacatatcgactcttcctaaaacctttgtctctttatcacagcctggacaaatgacgcgaaccgctttagtcgaaagcattccgatccaaaagtaaactaccgtgctgagaccgatggataaaagcccaagtatcataaacaaactagaaagcaaaactgactctttgaaaaagatcccgatgtacataatgataaacccaacgaaaaccaaacttaacgcaaatgttctgattttattaattttgctggagtatttcgccatgtccatccccctctgttttaactatagcacaaacccgatgggattttcttcatgttttcggttgaactggaatttacatatggagagttactgtgaaattgtttataatagttcaatgtgtttagaaaaaaggaatttcgttttaaccatagaattgaatcaaatagagaataaaaaaatttgaacaattgcattggaggaatagtgatggaaaatcttctccgtccaatttaccaagaaagagcaagtcaccccaatacattggctgtcattatgattgagagaagaaacaaaacatcttccttaacagataactttgatgcagctttgctggtgattgtaaaggatgctgatgagccagtttttataaagcattatgaatttgatcatcaaacagcttctttgcatgtggtaacagattctcagattcaagaatggattttgcttggaacaaatagaagaatcatagattggattgtaaatggcagagtcttgtttgaccgtaatgaatacgtagttgaactgattgacaggctgaatacatttccgtttgccgaacgtaaactgaagatcggactcgaatacggcaaattaatcagaaggtatgttgaagggaaagctttttttgaagccaatcaatttttagatgcctacaatgccgttgttcatgcgctgcatcatttagcacgtattgaagtaatcgacagaggattccatcccgaaaccacggtgtggagccaagtgcgccagatggagccccaagtgtacaaattatattccgagctgattgaaagtcatgagagcctggaaaaaagacttgaattattattcttagcaaatgattttctcatccattccaaagccgagatcggttcggcgcatcttttcgaagtaatgaaagaaaaagacatttggcaattcggtgagcttcttcaacatcatgacctaaagcactttacccaagatcttggcgttatgcttgattacttgacagaaaagggacttatcaacgtctgccagatagaaacgaaaggacaggctgtctatcaccgaggatattcttttaaaaaagatgttgactctgattcttgaccgtgttatattattaaacgtcgctgatgcgcttctgagaaaacaagctcacagcggcgggaaaataaatcaaaaaaacatttgacaaaagaaagtcaaaatgttatattaataaagtcgcttcaacaagaagtgaaaatgatctttgaaaactaaacaagacaaaacgtacctgttaattcagtttttaaaaatcgcacagcgatgtgcgtagtcagtcaaactagggtctgcacgacgcaggtcacacaggtgtcgccgcagaaagcggtgaacttaacctgtgatccatttatcggagagtttgatcctggctcaggacgaacgctggcggcgtgcctaatacatgcaagtcgagcggacagatgggagcttgctccctgatgttagcggcggacgggtgagtaacacgtgggtaacctgcctgtaagactgggataactccgggaaaccggggctaataccggatggttgtttgaaccgcatggttcaaacataaaaggtggcttcggctaccacttacagatggacccgcggcgcattagctagttggtgaggtaacggctcaccaaggcaacgatgcgtagccgacctgagagggtgatcggccacactgggactgagacacggcccagactcctacgggaggcagcagtagggaatcttccgcaatggacgaaagtctgacggagcaacgccgcgtgagtgatgaaggttttcggatcgtaaagctctgttgttagggaagaacaagtaccgttcgaatagggcggtaccttgacggtacctaaccagaaagccacggctaactacgtgccagcagccgcggtaatacgtaggtggcaagcgttgtccggaattattgggcgtaaagggctcgcaggcggtttcttaagtctgatgtgaaagcccccggctcaaccggggagggtcattggaaactggggaacttgagtgcagaagaggagagtggaattccacgtgtagcggtgaaatgcgtagagatgtggaggaacaccagtggcgaaggcgactctctggtctgtaactgacgctgaggagcgaaagcgtggggagcgaacaggattagataccctggtagtccacgccgtaaacgatgagtgctaagtgttagggggtttccgccccttagtgctgcagctaacgcattaagcactccgcctggggagtacggtcgcaagactgaaactcaaaggaattgacgggggcccgcacaagcggtggagcatgtggtttaattcgaagcaacgcgaagaaccttaccaggtcttgacatcctctgacaatcctagagataggacgtccccttcgggggcagagtgacaggtggtgcatggttgtcgtcagctcgtgtcgtgagatgttgggttaagtcccgcaacgagcgcaacccttgatcttagttgccagcattcagttgggcactctaaggtgactgccggtgacaaaccggaggaaggtggggatgacgtcaaatcatcatgccccttatgacctgggctacacacgtgctacaatggacagaacaaagggcagcgaaaccgcgaggttaagccaatcccacaaatctgttctcagttcggatcgcagtctgcaactcgactgcgtgaagctggaatcgctagtaatcgcggatcagcatgccgcggtgaatacgttcccgggccttgtacacaccgcccgtcacaccacgagagtttgtaacacccgaagtcggtgaggtaaccttttaggagccagccgccgaaggtgggacagatgattggggtgaagtcgtaacaaggtagccgtatcggaaggtgcggctggatcacctcctttctaaggatattatacggaatataagaccttgggtcttataaacagaacgttccctgtcttgtttagttttgaaggatcattccttcgaaatgtgttctttgaaaactagataacagtagacatcacattcaattagtaacacaagatatcacatagtgattctttttaacggttaagttagaaagggcgcacggtggatgccttggcactaggagccgatgaaggacgggacgaacaccgatatgcttcggggagctgtaagcaagctttgatccggagatttccgaatggggaaacccaccactcgtaatggagtggtatccatatctgaattcataggatatgagaaggcagacccggggaactgaaacatctaagtacccggaggaagagaaagcaaatgcgattccctgagtagcggcgagcgaaacgggattagcccaaaccaagaggcttgcctcttggggttgtaggacactctatacggagttacaaaagaacgaggtagatgaagaggtctggaaaggcccgccataggaggtaacagccctgtagtcaaaacttcgttctctcctgagtggatcctgagtacggcggaacacgtgaaattccgtcggaatccgggaggaccatctcccaaggctaaatactccctagtgaccgatagtgaaccagtaccgtgagggaaaggtgaaaagcaccccggaaggggagtgaaagagatcctgaaaccgtgtgcctacaagtagtcagagcccgttaacgggtgatggcgtgccttttgtagaatgaaccggcgagttacgatcccgtgcaaggttaagcagaagatgcggagccgcagcgaaagcgagtctgaatagggcgcatgagtacgtggtcgtagacccgaaaccaggtgatctacccatgtccagggtgaagttcaggtaacactgaatggaggcccgaacccacgcacgttgaaaagtgcggggatgaggtgtgggtaggggtgaaatgccaatcgaacctggagatagctggttctctccgaaatagctttagggctagcctcaaggtaagagtcttggaggtagagcactgattggactaggggcccctaccgggttaccgaattcagtcaaactccgaatgccaatgacttatccttgggagtcagactgcgagtgataagatccgtagtcgaaagggaaacagcccagaccgccagctaaggtcccaaagtatacgttaagtggaaaaggatgtggagttgcttagacaaccaggatgttggcttagaagcagccaccatttaaagagtgcgtaatagctcactggtcgagtgactctgcgccgaaaatgtaccggggctaaacgtatcaccgaagctgcggactgttcttcgaacagtggtaggagagcgttctaagggctgtgaagccagaccggaaggactggtggagcgcttagaagtgagaatgccggtatgagtagcgaaagaggggtgagaatcccctccaccgaatgcctaaggtttcctgaggaaggctcgtccgctcagggttagtcgggacctaagccgaggccgaaaggcgtaggcgatggacaacaggttgatattcctgtaccacctcctcaccatttgagcaatgggggacgcaggaggatagggtaagcgcggtattggatatccgcgtccaagcagttaggctgggaaataggcaaatccgtttcccataaggctgagctgtgatggcgagcgaaatatagtagcgaagttcctgattccacactgccaagaaaagcctctagcgaggtgagaggtgcccgtaccgcaaaccgacacaggtaggcgaggagagaatcctaaggtgatcgagagaactctcgttaaggaactcggcaaaatgaccccgtaacttcgggagaaggggtgctctgttagggtgcaagcccgagagagccgcagtgaataggcccaggcgactgtttagcaaaaacacaggtctctgcgaagccgtaaggcgaagtataggggctgacgcctgcccggtgctggaaggttaagaggagcgcttagcgtaagcgaaggtgcgaattgaagccccagtaaacggcggccgtaactataacggtcctaaggtagcgaaattccttgtcgggtaagttccgacccgcacgaaaggcgcaacgatctgggcactgtctcaacgagagactcggtgaaattatagtacctgtgaagatgcaggttacccgcgacaggacggaaagaccccgtggagctttactgcagcctgatattgaatgttggtacagcttgtacaggataggtaggagccttggaaaccggagcgccagcttcggtggaggcatcggtgggatactaccctggctgtattgaccttctaacccgccgcccttatcgggcggggagacagtgtcaggtgggcagtttgactggggcggtcgcctcctaaaaggtaacggaggcgcccaaaggttccctcagaatggttggaaatcattcgcagagtgtaaaggcacaagggagcttgactgcgagacctacaagtcgagcagggacgaaagtcgggcttagtgatccggtggttccgcatggaagggccatcgctcaacggataaaagctaccccggggataacaggcttatctccccaagagtccacatcgacggggaggtttggcacctcgatgtcggctcatcgcatcctggggctgtagtcggtcccaagggttgggctgttcgcccattaaagcggtacgcgagctgggttcagaacgtcgtgagacagttcggtccctatccgtcgcgggcgcaggaaatttgagaggagctgtccttagtacgagaggaccgggatggacgcaccgctggtgtaccagttgttctgccaagggcatcgctgggtagctatgtgcggacgggataagtgctgaaagcatctaagcatgaagcccccctcaagatgagatttcccattccgcaaggaagtaagatccctgaaagatgatcaggttgataggtctgaggtggaagtgtggcgacacatggagctgacagatactaatcgatcgaggacttaaccacattttgaatgatgtcacacctgttatctagttttgagagaataagtttttcaaaaaaacacttgattttctcaagaatacatagtataatgttaaatgtcactgaaattgtctggtgatgatggcgaagaggtcacacccgttcccatgccgaacacggaagttaagctcttcagcgccgatggtagtcgggggttccccctgtgagagtaggacatcgccaggcagacttcattccgcagtagctcagtggtagagctatcggctgttaaccgatcggtcgtaggttcgaatcctacctgcggagccattattggagagctgtccgagtggtcgaaggagcacgattggaaatcgtgtaggcggtcaactccgtctcaagggttcgaatcccttgctctccgccactgatacttatacataattacaattgaaagtctgggcccgttggtcaagcggttaagacaccgccctttcacggcggtaacacgggttcgaatcccgtacgggtcattatatgatggaggattagctcagctgggagagcatctgccttacaagcagagggtcggcggttcgagcccgtcatcctccaccattatatcatcgcggggtggagcagttcggtagctcgtcgggctcataacccgaaggtcgcaggttcaaatcctgcccccgcaaccaaattttaaaatggtccggtagttcagttggttagaatgcctgcctgtcacgcaggaggtcgcgggttcgagtcccgtccggaccgccatttaaatacttaggctcggtagctcagttggtagagcaacggactgaaaatccgtgtgtcggcggttcgattccgtcccgagccaccacctatgccggtgtagctcaattggtagagcaactgacttgtaatcagtaggttgggggttcaagtcctcttgccggcactgttttttcaaaatttaatgtggaggggtagcgaagtggctaaacgcggcggactgtaaatccgctccctcagggttcggcagttcgaatctgcccccctccaccatttataggggcatagtttaacggtagaacagaggtctccaaaacctccggtgtgggttcgattcctactgcccctgccaaatttatgacatcttgagattatggcggttgtggcgaagtggttaacgcaccagattgtggctctggcactcgtgggttcgattcccatcaatcgccccatattatcattgggctatagccaagcggtaaggcaacggactttgactccgtcatgcgttggttcgaatccagctagcccagtctcactttttatatcaactgcatataatgtattaagtccattaaaaatgcggaagtagttcagtggtagaacaccaccttgccaaggtgggggtcgcgggttcgaatcccgtcttccgctccaattacggcggcatagccaagtggtaaggcagaggtctgcaaaacctttatccccggttcgaatccgggtgtcgccttcttattgccggggtggtggaattggcagacacacaggacttaaaatcctgcggtaggtgactaccgtgccggttcaagtccggccctcggcaccaattttacttacatggtaagttgaattggtgtttgtgttttatcattataactaatcatattaatgatctacttatgtagatcatttttttaatgctttgatttatcataacaagttaagttccgaggcctattataaagcggctgtatagctagtctttcaacacttttattttatatttccataaaaacttttttgaaatacgttgacactttatgagattcatgatatatttatattcgtcggttagatacgacgtaaaacttgccggtgtggcggaattggcagacgcgcacgactcaaaatcgtgttccttctggagtgtcggttcgaccccgaccaccggtatactgaaaaacccgtttcttaacagaaacgggtttttattttttattaaagaaaaggagccgaggctcctttttatacttactcagcgtattggtctaggatctcttctagcacctcttctagctcttctgtatcttcaagctctgattggctgaaacggacgcgtacaagctgttctccgtcattatacatctcttccagccaccctcggagtcctcttgctctgcggtcgacttcgaaaatgatttccaaaccgtcttcgtctaaaaggaaaatgagctctaattcatcaagcatctgacgataatatccggaagtcggaacgaattcgaattcttgaacaaacggaagacgacgctggaagtatggcgcttgttcgcagtctgcttcgttaagacggaagcccaggttttcgattgcttcaagcacattttcaatccaagggtgcgcttcaacgaaaatacggtcatgatcggatttatcgataccgccttgaatgtcaaggtctgtcaccacggcaacctctactttccctacagtgatcggcgtatctagaggcagagtgaatgtgaacggaaattgatgctcttcaccaggctgtatggtaaatgaaccagtgacccggaaagaatgaattgtagcgtatttccggtgctcttcatcgtcttttacaatgacataccgtgtgctaagctgtaaatcgatataacggatgtcctgagcgatttttccgcctttgacatgtaccgttccctgtacttcttctcctggaaaatatgcgtctttttctaaaattgtatctacttttgcagctccaattccggcacttgccgcaagcttcttaaaaaatgacatgttagatcttcccctttttcttttttctcaacagatatacgtaagaaggaggaaaaaagattcgtttgattcatacttttttcctattattcgtctcggcctagggacagactaagaataatattgaaaataaaggagtggatggaagtgaataaagaaagtttggttgcagatgaattacacagaatgtttttggccggtgagctgcaaatcacagtagaggaggatataaacagtatttccgaaaggctgagaaacggtgatctcagtttagaccgattaagcggtgaagacgcgtttataaaagaaacggtaaacgaggctttaagaagagtggagcaataaaaaagagacggcatctcatctttgagatcccgtctctttttgtggtctttactgcaagataaaagcgtaattgctcacccgagccaccccttttctaacagaagatctgacagttcatcatggagataaacagttgtatctaattgatcatgcaatgctcttctgatgtggggattttcggcttctgttattgcgacagtgtatttgttaatgctggtttttattgttgttaacaaatcaagaatatctttgggacaaagactttgttcaatgggaaaccacctcctttgttttttagcagctcctgataagaaagtatttggctttgtttcttgcttctatacaaaatgctataataagcaacaaattttgttggggggtgtgatgatgaagcagattattgcgatgggaggcgggggtttttcgatggagccggataatttgtccctcgatcaatatatcctcaatcaatcaaaacgagagcagcctcgtatttgttttttgccgacggcgagcggagattcccaaaactatattcagcggttttatcatgcatttcaaacattggattgcgtgccgtctcatttatctttgtttaagccgccatcatcagatttagcttcttttgttatggaaatggacgtgatttatgttggcgggggaaatacgcggaatttacttgtgttatggaaagagtgggggctggaccatattctcagggaagcatggaagaacggtgtggttgtagctggaataagtgccggtgcgatctgctggtttgaagaaggggtgacagatcagccggaccgctgacaagtttgaaaagtttaggttttttgcaagggagcttttgtccccattatgacggggaaaaggatcggagaccggcgctgatatctaacaagttcttatgcagtggctatgcagcggatgatggggctgctctccatttcataaatgatcagctgtttcagactgtgagttcaaggtcgggtgcaaaggcatatcgggtgatgatggctgaacatgaaatagctgaaatcccgttgccggtcaaatatttagggtgaaattggctgaatattatctatattcctctttttttcagattgattttatgataagatgagtgcgaaatcaatagttactgggggtgcccgctttcgggctgagagagaaggtaagcttcttaaccctttggacctgatctggttcgtaccagcgtggggaagtagaggaattgtttttgttattgtcttgctgggcaataatatgtttctttctgactgtaaccgggttcatttatatgaatccggttttttgtgctggttatgggcttgattttgtcctttcaaacgtagagaggggaaggaaaagtaatgcaaaacaattcagtgcagcaagccaacatttccattatgtcaagtttttcaggcagcaagaaggtatacgtggagggttcttcttcggacatccaagtgccgatgagggagattgcattgagtccgacgacgggatcgttcggcgaagaggaaaacgcgcctgtgcgtgtctatgatacaagcggaccgtatacggatcctgaagtaaccattaatattcaagaaggattaaagccgctccgccaaaaatggattacacagcgcggtgacgtggaagagtatgaaggtcgggctataaaaccagaagataacggttataaaaaagcaaatccaaacgtaagctacccaggattaaagcggaaaccgctgagggcgaaggcaggtcaaaatgtcacacaaatgcactatgcaaaaaaggggatcattacacctgagatggaatttatcgccattcgtgagcatgtgtctcctgaattcgtcagagacgaggtagccagcggccgggcgattattccttcaaacattaatcaccctgaaagtgagccaatgattatcggccggaattttcatgtgaagattaatgcgaatatcgggaattcagcggttacgtcatccattgaagaagaagtggaaaaaatgacgtgggccatccgctggggagcggatacgatgatggatctctctaccggaaaagatattcatacgacgcgtgaatggattatccgcaattgccccgtgcctgtgggaactgttccgatttatcaggcgcttgaaaaagtaaacggcgtagcggaggatttaacgtgggagatttatcgtgatacgctaatcgagcaggcagaacagggagtggattattttacgattcacgcgggtgttttgcttaggtatgtaccgctgactgccaaacggacaactggtattgtgtcacgcgggggagcgattatggcgcagtggtgtctggctcatcatcaagaaagctttttatacacacattttgaagaaatatgtgagattatgaaaatgtatgatattgctttctctcttggggatggtttgcgtcccggatcaattgctgatgccaatgacgaagcgcagtttgctgaattagagacgcttggagagctgacgcaaattgcctggaagcatgatgttcaggtgatgattgagggtcctggacatgttccgatgcataaaatcaaagagaacgtcgataaacaaatggacatttgtaaagaagcgcctttttacacattggggccgttgacaacggatattgctccgggatatgaccatattacttcagcgatcggagcggcgatgatcggttggtacgggacagcaatgctttgttatgtaacgccgaaggagcatttagggctgccaaaccgtgatgatgttcgtgaaggagtcattacatataagatcgctgcgcacgctgcggaccttgcaaaagggcatcccggagcgcaaatccgggatgatgcgttatcgaaagcccgttttgaattccgctggcgggatcagtttaatttatctcttgatccggagagagcccttgaataccatgatgaaaccctgcctgctgaaggagcaaaaaccgctcacttttgttccatgtgcggtccgaaattttgcagcatgagaatttcacaggatattcgggattatgcgaagaaaaacgatctcagtgaagcagaagctataaataaaggattaaaagaaaaagcaaaagagtttgtcgatacgggaagcaatttatatcaataaaaaaaatgaagatggagaatgctccatcttcattttttttagaaaaacagagagcgtcgaagcggcggaatactctgttcaaagcggaaaacattttctggatcatatttcgttttgacacggcggagtcgttcaacgttttcgccgtaatatgttcttggccagtttctgatttcgatatctggccaatttacgtagtctcccatcgtttctctcgaaagggacgttctcagcccctcaatccagcggacattttgtcttttttcttcaggagatgtccagtttgttaagtattcctgggcgatgattgcatcacgataataaaatgccgtttggtcgggagcgatccgtccggctgccccgccgagtgcttgctgccagacactggcgttttgattcggagcgtgctctaaaaagtgttttattgttgagatcggacgttctgataatggcttttcaatgaaagagccggagcgtttcattttttgaggctgattgcctcccgggctgttaaaaaaggttaccgcttcgatgaacggcattgtttttaccattccgcttgttgggcttcctgctttcaataaagtctttaacagtttttttaactctgtttttggcccgacaaattggccgagggcttctatgcggtttacttctttaggccaaaactctattgatgatgtaagccggtcatctgtatacggggcccagtgctgccacgtgttaaatacttcctcaaaatcatcccatccccatgtaatagaaaaaatcgacacttgagagatgggcactgctttaaatgtcatggaggtgactatgccgaaattgcctcctccgcctccctgagacgcccaaaataagtctggatgatttgaacagctgactgtaatcagatcagcgccctctttttcgtctgctacgatcatctcaagctgcacgaggctgtcgcaagtaaggccggcagcccttgttaaaagtccaattcccctccgagagttaaacctgtgagccctacattggcaatggtgcctgcgggaagcgtcaggccgtattgccagagtgtccgatagacttctcccaattcagcccccgcttcaatataggccagctttttatcctgattcacagttatttttttcatttcgcttaaatcaataacaagaccgttatttaaaagggaaaagttctcatagctgtgtctgccgcctctaatacggaaaggcacacggttttcacgcgcccatttcagcgcattgagtgcatcctgtttgttttggcaaaacacaatgatgtcaggatacctttctaagcttaggttaatattggttcttgcttcgttatagtccggatcatcccgtgtcacgatacgtccggtcaattttgtcttttccacactcccacatctctttctctcgtattctagtttctctagcttatgcgtcaagggaaaagagtgtataaggaaaaagcggggatgcaatctgatacagtgtcaactcccttaaaaaatagttgacaggtcggtattgtatgaattaacatggtcagtacaaatttttcaaatttatcgcgctgatcggaacaccgaaggctcttatcgtttagataagggccttttttgtatgaaaaaggagggattattgatgggagtcaaaaaagaaaaggggagaaaacgattcagaaagcgaaaaacctacgggaatcagattttgccgcttgagctgctgattgaaaaaaacaaacgagagattataaacagcgcggagctcatggaagaaatttatatgaagattgatgagaagcatacgcaatgtgtaactaaatagaaaaaaacccgctgattacagcgggtttttgcatttctacattaagcatcttttttaatcggcaatccaaggccttctgccacgcgttttccgtattcaggatccgctttgtagaagtgctcgatttggcgcagtttgatttcttctttttctaccggcttcatagcattaacgatattttcaacaaggcgggtacgttcatcttcactcattaaacgatacagatcaccggcttgagtgtagtgatcgttgtgatcgtagcttacgctgtcagcgatgccttgtaccggatatgctgcttgcttatcctcaggtgactcttttggaccgccgaagctgttaggctcgtaatacacagatccgccgccgttatcatcaaagcgcatttgtccatcacgctgataattgtttactttgttgcgtgcgcggttgattggcagcgcttgatggtttgcaccgacacggtagcggtgtgcatcatgataagcaaacagtcggccttgaagcattttatccggtgaaacatcaataccaggcacgagtgttccaggtgaaaatgtcgcttgttctacctctgcaaagtagttttccggatttctgtctagaaccatgcgtccgacctcgattaacgggtagtctttttgagaccaaacttttgtgacatcaaacggatcgaaacggtacgtgtttgcatcttctaaaggcatgatttgcacatatagtttccatgcaggataatcaccgttttcgattgcattgaaaaggtcttctgtatggtaatcagggttttcaccggcaatttttgctgccgtattgacatcaaggtttttcacgccttgttccgttttaaaatgatatttaatccatacgccttcgccttcggcatttgtccatttgaatgtatggcttccgaagccgtgcatgtggcgaagtgttgcaggaattccgcggtcagacatcaggattgtcacttggtgaagtgactctggtgaaagtgaccagaaatcccatacagccgttgggtttttcaggtgtgtttttggatctcttttttgtgtatggatgaaatcagggaacttaatcgcatcgcggataaagaatacaggcgtattgttgccgacgatgtcgtagtttccttcttcagtataaaatttaacagcaaatccgcgcgggtcgcgaactgtgtcagcagagccaagttcaccggcaactgttgagaaacggatgaacaacggtgtgcgtttgccgacttcagaaaggaaagcggctttcgtgtattttgttacgtcgtttgtcacttcaaaatatccgtgtgcgcctgctcctttggcgtgaacaacacgttcaggaacacgttctcggttgaaatgggccaatttttcgagtaaatgtacatcttgaattaaagttggtccgcgagaaccggcagtcattgagttttgattatctccaaccggagcgccccagctagttgtcagtttatttgaactcatgttatcacctcttggaatttataagaacataatatcatctctaagtaaaaagtcaatattattttataattattataaaatagttatctctattaagcgatatctagtattgaaagtgtggaaaaaccttgttggaacagctttttatggcacttgataatttttgaagaaataatttttccttctctatttgcgaaacaagcagagtaagtgataaacaaggatatcaaaaatcgtatttaaaaaagagttgacatatcggaataatttgaattaacatgttattcaaacaaaaaacaattgggcagctgatcggaccgccgaaggctctcatctctacaagaacagagatgggggcctttttgttttttttgaaggcggggttggcagaaagagagggataaaagtggctgtgaccatcagcatcaaagaaaaggcatttgttcaagagggccgcaaaaacacggtcttagagaacatagaattatcaatcgcaccaggcgaatttctaacgcttatcggaccgagcgggtgcggaaaaagcaccctgttaaagattattgcagggcttgattctgaatatgacgggagtgttgaaattaacggccgcagcgtaacagctccgggtattcagcaaggatttatttttcaggaacaccgcctctttccttggctgactgttgagcagaatattgcagccgacttgaatttgaaggacccaaaagtcaaacaaaaggtggatgaactgatcgagattgtcagattgaaaggatcggaaaaagcatatccgcgcgagctgtcaggcggcatgtcacagagagtagccatcgcccgggcccttctgcgggagcctgaggtgctgcttttagatgaaccgtttggtgcactcgacgcttttacaagaaaacacctgcaggacgtgctgctggatatatggaggaggaaaaaaacaacgatgattctcgtgactcatgatatagatgaatctgtttatttaggaaatgagcttgcgatccttaaggccaaaccggggaaaatccataagctgatgcccattcacctggcgtatccgcgaaaccggacgactccggatttccaagcgatcagacagagagtgctgtcggaattcgagaaaacagaagatttggagtacgcagaaggatcagggatatagaaagggcggaagcggaaatgaaaaaaggactcattgtattggttgccgttatttttctgctcgcaggctgtggagcaaatggagccagcggtgaccacaaacaattgaaggaaatacgtattggtattcagcaaagcttaagcccgcttttgatcgcaaaagaaaaaggctggttcgaagatgcatttgaaaaagaaggcatcaaagtgaaatgggtggagtttcaaagcggtccgccccaatttgaaggccttgcggcagacaaacttgatttttctcaagtcggtaattcgcctgtgatcgctggacaggcggcaggcattgactttaaagaaattggcttatctcaggatgggttgaaagcgaacggcatccttgtcaaccaaaacagcggcattcaggacgttaaggacttaaagggaaagaaaattgcagtcgctaaaggcagcagcgggtttgattttttgtataaagcgcttgatcaagtggggttgtcagctaacgatgtgacaattattcagcttcagcctgatgaagcagcttccgcatttgaaaacggatctgttgatgcctggtccatttgggagccgtacttgtccttagaaacaatgaaacacggggcaaaaatccttgtgaacggagaaagcacagatttatattccccgggttttactttagtaagaacaaagttttcagaggagcatccagacgaagtggtccgttttctgaaggtgtttaataaagccgttgtatggcaaaaggaacatctggatgaagcagcggacttgtattctgacattaaagatctcgataaaaaggtcgtcgaaaatgtgctgaaaaatactgaacctctgaatgaggtcatcagtgacgacattgtgaaagcgcagcaggaaacagcagattttcaatttcgaacaaaggcgatagataagaagattgatgtgaaggatgttgtcgataacacttttatcaaaaaagcattaaaggaacattcctcaggaggtgatcaatgatgaaagcagaggctgcgggctcgctgcccaaaacgaatgcggaagcggtgcgaaaaaagcccggaaggaagagatacggctggatgaaggggcttttactgcccgctgtcatcattgccatctggcaggtcatcggcgggctgggggttgtgtccgctacagtgctgcctacacctgttacgattgttctgacctttaaggagcttattttgtccggcgaactgttcggccatctgcaaatcagcatttatcgggcggcacttggttttttgcttggcgcggggcttggattgatgatcgggattttggccggattttccaaacggacggagctgtatcttgatccgtcgttgcaaatgcttagaaccgtacctcatctggccgtcacgccgctgtttattttatggttcggatttgacgaagtatctaaaattttgctgattgcgctcggtgccttctttcctgtctatatcaatacgtttaacggcatccgcggggttgacgcgaagctgtttgaagtcgcccgggtgcttgaatttaaatggcatcagcagatatccaaagtgatattgccggcagccctgcccaatatattgctaggcattcgcttatcgctcggcattgcatggctcgggctcgttgtggcagagttgatgggctcaagctcgggagtcggctatatgatcatggatgcgagacagttttcacaaacgaataaagtctttgcagggattatcatttttgcagtggttggaaagctgacggattccttcgtcaggctgctggaacgaaagctgttaaagtggagaaacagctacgaaggataaaagatataaaggggagatgaatatggaaattctttggtttataccaactcatggagacgcgagatatttaggatctgaaagtgatggacggactgcggatcatctttactttaaacaagtcgcgcaggcggcagacaggctgggatatacaggagttcttctgccaacgggaagatcgtgcgaggacccgtggcttacagcgtcggcactggcaggagaaacaaaggacttaaagtttttagtcgcggtaagacctggtttaatgcagccttctctggcagccagaatgacatccaccctagaccgcatttcagacgggcggctgctgatcaacgttgtggcagggggcgatccgtatgagctggcaggcgatggcctgtttatcagccatgatgagcgctacgaggcaacagacgaatttttaaccgtttggcggagacttttgcagggagaaacggtttcctatgaaggaaagcatataaaagtggaaaacagcaatctgcttttcccgccgcagcaagagccgcatccgcccatctatttcggtggttcgtcacaggctgggattgaagctgccgcaaagcatacagacgtatacttgacatggggggagccgcctgaacaagtaaaagaaaagatagaaagagtcaaaaagcaagcggcaaaagaagggagatccgttcgatttggcattaggctgcatgtcattgcccgtgaaactgaacaagaggcatgggaagcggcagagcgcttgatcagccacttggatgatgacaccattgccaaagcgcaggcagctttgagccgttacgactctacaggccagcagcggatggccgtccttcatcaaggcgatcggacgaagcttgaaatcagtccgaatctgtgggcggggatcggcctagtcagaggaggggcaggaacagctcttgtcggtgatccgcagacgattgccgaccggatagcggagtaccaggcactcggcatagaatcgtttatattctcaggctatccgcatttagaagaagcgtattattttgcagagcttgtatttccgcttttgccgtttgaaaatgatcggacgagaaagcttcagaacaaaaggggagaagcggtaggaaacacttattttgtcaaagagaaaaatgcatgagtttaataaaaatacagcccccaaacatggtatgatattcaaaaaaagggggctttttttctgaaaacattgagaagcgcggcagtcatttgcctcatagctatgctgtcagcatgcggacattcaaaacagatggaaatcaaagcggcggacatatcagaacttgaaaaaaacagaatggatgtcgcagcttcacaggcattcactgccgaagccgtcaatatcggtgaaggtgtttcttcagctgacatgtacatcgaacattatcaaaagggaaagcttgttgagaggtttggaccggctagtgcagattattcagaggaaaaacccgataccatacaatttgtttattttgagaaggaagagggggaaggaaagaataaacataccaccattcattttggcattgtggataaacagggaaatatagcggctgattcatcggtgaaacgtgacgatagcacaacacaggaaatgactcagaatatttcatcgccggaaccgattactttcgagaagcctgctttgatcggcagcagtattagagggactgacgagacaatgcacacctctgaacataaaaaagagctcattaagcatcaagatgcgttactgtattatgtggaattgcatcattagaatgggcggcttcaggccgtctgttttacaaagcggtatgcttgcttttttgaatggtgcatgatacattttaaatagtaacaatttcgatttaaagggaggctatgtgacttggctaaaaaatcaaaagtggcaaaagagttaaaacgccaacagcttgttgagcaatacgctgatattagacgcgagttgaaggaaaaaggagattacgaggcactcagcaagctgccaagagattcagcaccgggaaggcttcacaaccgctgcatggtaacggggcgcccgagagcatatatgaggaagtttaaaatgtccagaatcgctttcagggagctggcccataaaggccagattcccggtgtgaaaaaagcaagctggtaagaaaaaactccggccgattacagcgcgccggagtttttttcgtttttcttgaaagagatgacgtaggaaaggtgctggatgatcatgatgataaacacaataataatagggaaaaacggaatacgcgattgaaaaagcggataaaaaatgagaagaaccgctgcggcaggcagcgagaagtagacagcgatatatgacgcgcgacatgcttttgccgtcatcatctgctctctttcatcctgctcttcaaactcatcaggcagaagaagctgctttctggcagggcggctttttttctgtaagtacaaataaaccgcaaacgccgcaacaaacagaataaagggggtgaggtttaattcaaataccatcccgccgctctttgtgccgaaaaaagatgctatgccttctgaggcttcaaagtatgaaatcagcgcccagcatgcaaggccaaataaaacaaggtgaaaagctgcttttgttttcatgctcatcttagttttcctcctctaaccaaaagacatcctccattttcatggagaaggctttgcagattttcagtgctaacagcagtgagggaacataatcgcctttttcaatcgctgccacagtctgtcttgtgacgccgaccgtttctccgagtttttcctgagaatagccgaagcgtgccctcagctcttttactttatttttcatcatgacgtctgtccccttcacaatctcgattgattatattgtatagtatacttaacattatgtaaatggaacttaacaactttacaaaaagataactttttttcgacaaaatttttatattcccttgacgaaaaataaataaacatgtaatataaaaaaagtcagagcggtactgttgctgacaatcacaaatgcgggtgtagtttagtggtaaaacctcagccttccaagctgatgtcgtgagttcgattctcatcacccgctccatacatacgttattaacgcagtgtttcgtttctcagataaacgaagtattgcgtttttttatgtaaaaaagaacacgacattcgtgttcttttacgtaagccaatgtactgtatgggtgccgccgtgaatttgttcaaacattttcgttaatgatgataagaggttaacagcgctgcttttctcaatcgatggcgggaaaaaaatgatttgcagcatattcttagtctcgtttgaaacgggatagtggttgacgctgtttttgaaatcgccaaaaatgccgttttcatcagagaaaagcagtatgttttctttttctcccaatgagatccggaccggctcatgaagctttccggcatcataaatcataataggcagagaatattttaatgcgaaaaaatcgattgtgtcatgggccgagtctttactttccatgaattgttccttggatatcgggaccagcatgtcctccattggggttgtttctccctcaaatgaagggttaagctgtttaaagagtttctgccattccttgacgaaggattcatcggatataccgccgtccgcatagtcgaaaaacaaggattcttgaaacaggcggagtctgcctttcagcatttgcggtgaggagccgacttcgatattctcataaatgacagcagctgcatgtaagccggccgcacgttcagtaataacagaatcaagtttgatattcactagcattcactccagttacgtgatatcaacctattataaacgctgtatcgttttatcacaaagaaaggaggctgtgcaaaacatgaacgtttatcagctcaaagaagaattaattgaatacgcgaaaagcattggcgtggacaagattggttttacgactgctgatacttttgacagtttaaaagaccgtttgattcttcaagaatcactcggctatctctccggctttgaagagccggatatcgaaaaaagggtgacgccgaagcttcttttgccgaaagcgaaatcaatagtggcaattgctctcgcatatccttccagaatgaaggatgcgccgagaagcacgagaactgagcgcaggggcattttttgcagagcttcctggggaaaagactatcatgatgtgctgagggaaaagcttgatctactggaggattttctaaaaagcaagcatgaggatatcagaacgaagtcaatggttgatacaggtgaattgtctgatcgcgccgttgcggaacgtgccggaattggattcagtgcgaaaaactgtatgatcacaacacccgagtatggctcttatgtgtatttggcggaaatgatcacaaatatcccttttgagcctgatgtgccgattgaagatatgtgcgggtcctgcacgaaatgcttggacgcctgcccaacgggagcactggttaatcccgggcagcttaatgcgcagcgctgcatctcttttctgacccagacaaaaggatttttacctgatgaattccggacaaaaatcggaaaccgcctgtacgggtgcgatacgtgccaaacggtatgccctctcaataaagggaaggattttcatcttcatccggaaatggagcctgatcctgagattgccaaaccgttattgaagccgcttttgaccatcagcaatcgggaatttaaggagaaattcgggcatgtctcaggttcttggcgcgggaaaaaaccgattcagcgaaacgccattctcgcgcttgcgcattttaaggatgcttccgcactgcctgaattgacggaactgatgcacaaggatccgcgtcctgtcatcagggggacagccgcatgggcaatcggaaaaatcggagaccccgcctacgcggaagagcttgaaaaagcgctggaaaaagagaaggatgaagaggcaaagctggaaattgaaaaaggaattgagttgctaaaagcttcaggcatgactaaacaaggcctgtcctgacatacgtatagagcagaaggaaaaaacacttgagatcatccaagtgttttttctctataaaaaagtatggcgggtggggtgagcttgaagtacattttagaacaattagcggaggagcggctgggctttctggttaacgggcatgctatgagacaggagtctcaagtcggagaccttaaagtcatggagcgtaagaaaaagcttctggaaaaacgtaaagttgacatcataaaagcgaaagcaaaggccgtgattaatcatgtgcgggttgaggatgacggaacgacctgcctttcgtataccatccattacgaatacgtgtgtaaggaacaagatgacagcttgtatatagaagagcacatagaggagcgaatggctttcctgtatgatcacattttgattagtgatcaggaaattgcgaaaaagccggctggatttcatgaagggaccagtattattgactattctgaagctgaagaggaaagagaagcgtttggcagggcttttcaatacgatcgtctcggcgctgtccaatatgccgagaaattttggaacaagcgcaatcctgcttataaaaatttcagcgataactgtacaaattttatttctcagtgtcttcatgcaggaggcgcgccgatgcgcggtcatccgaacaggggatcaggctggtggatgaaacaaagctcatggagctacagctggacggtggcgcactctatgaaaatgtatttgtcgaattcaaaggccggactgcgtgcggtgcgggtgaaatcagcggaagaactgatgccgggcgatgtgatttgctatgacttcgaaggagacggccgctttaatcatacaacgattgtcgtggcaaaggacaaaggcaatatgccgcttgtcaacgcccagacctatgacagcaggatgaggtattggtcatatgaggattctacggcatacacgccgtcaatacgatatgccttttttcatatcgttgatgatacgacaaaagagtaattaatgttataatgatgggcggataagaaaaacagaggtgaacattgtggcattacatgtcgttttatatcaaccagaaattcccgctaacacagggaatattgcacgtacttgtgcagcaaccaatacaacgctacacctgattcgtccgctcggcttttcaacggatgataaaatgctgaagcgtgccggactcgattattgggagtttgttaacgttgtgtatcatgattcgttagaagaattgtttgaggcatatgaaaaaggccagtttttctttattacaaaattcggccagcagcctcatacatcatttgattacactgatcttgacgaggattatttcttcgtgttcggaagagaaacaagcggtttgccaaaggatttaattcaaaataatatggaccgctgcctgcgtcttccgatgacagagcatgtcagatcgttaaatctgtccaatactgccgcgattcttgtttatgaagcgctgcgccagcaaaattaccgtgatttaaaatagtgaaaaaacccgctcatcgatgatgggcgggtttttttgcggatgttgaaatgctttgtttcgtttttgggcttaacaacgtaacagtgttatgttacaatgtacccatcaaaggagctggacttatggaagaacaattaatctctaaaaaagaattacttgaaagaacatcgatttcatacggtcagctgtatcgatggaagcggaaaaacttaatacctgaggaatggtttattcgtaaatccacatttacagggcaagagacgttttttccgagagaggagattttaaaacgtatatcaatgattcaaaagatgaaagaaaatttgtctttggatgaaatgagggaaatgctgtcgccgaaaatgaaggatgtcagcatgaccgctgatgaattgcttcataaaggtttggtttcaaggcctgctcttgaagcctattcagaagacggaggaagtccggttttttcatccagcgatttgctttcgctatatgtgcttgagggactgctgcagtctggaaatgtcagccttgcagaagcaaaaatggctgcagaggtattaaagaagcatgataatgaagagattgaaaaacagacggagctgattgtgctccgcaagctcggtgtcacaacttgttttatagcggctgcggcggacagcattttgtttgaatcatccgtaaaggttgtggaacgggtagatttattaaaagcttcagaggaattaaaaacaacatttatgcaggagggccatcgatggatgtagtggaaaagctggtgataaacggatcaggaagttcaaagggaggaacatttcaatctgttgagattaatggcagcgggacagtggccggggacgtggagtgtgacactttttcttttaatggaaacggaaaagctgacggcagcgtcaaagcgaaagcggtaaccatcagcggttcaggaaagatacatggagacgttgaagcagaatctatccggatgaatggcacttgttttattcaaggagaggtatctgcaaaacaattgaaaatcgctggatcatcaacatttggcggcactgtcaaggctgatggcattgacattagcggaaaagctgtcatggaagcagattgtgaaacagaaacctttcaatcagaagggaaatgcaaaatcagcgggcttttaaatgcagaccaggtgatcattaagctttctgcaggggaaagctatgcgcgggagatcggctgccgccatcttcaagtgacctgcagaaaaggaatgctgacattgctcagattgatgccgcagcctgttctaacagcagagctgatcgaaggtgacgtgattgaattgacaaatacaaaggcgaaaaccgtgcgcggaaataaagtgatcatcggcccggattgccagattgaaaccgtcgaatacagcggggactatacctgtgatccaagcgcatcggttgaaacatccacaaagttgtaaggaggatcgtaatggagacaacaaaactgggaaatttaaaattatatggcgctgggcatgccgcaggaggcgcgtatcacaatgtcagcatcaaaggagaaggtgtagttggagaagggttgtctgctgtaggctgccgcatatacggaacgggcctttttctcggaaaagcagagactgagcggctgcgtgtgctcggagaaagtgaatgtaaaggcgatctgacagccggcaaaatcaatatatatgggataatgaaagtcagcggctcacttcaatttgatcgattcaatctgaaaggccagactgaaattggcgggaatatgactggagaatcctgcgatgtgaaagggaagcttagcgtaaaaggtgattgtgaaacagaaatgttccatgtcacaggctgtgttgatgtatcggggttattaaattcgggtgagatcaagctgggattgagccatgatataagccatgtgcaggaaatcggcggaacaacaattacagtgaaaagacgcgcgagtttttttaatcggaagaaagtgaagctgatcgccgatgtcatagaaggcgatcgggtttatttggagaataccgaagcggcagtcgtcaggggaaaagaagtgatcatcgggccgggatgcagtatcggaacaattgagtacgaaaacaaatatgaatgcgatccgcattcacagattaaagaaaaaacaaaactgtaaaacattgttctgttatacaaaaagggtgctctttcaggagcacccttttttattcttttccaggcttgctttcgtatcctgcggtaaaaattgatactaaaaaagtgacaatgacacccatcatgatgattgttttcaccgtctctccccctcttcaatttttccgtgctgtccgagtctggatgattctgtatttttctttattatgaacggtcgcagtctgccttgtcaacgatgtataagtatctttatttttaagaaaccaaagcatgtatcacgagatggcggcatagattgtatcaaagtaccttatttgcatagtgtatcaaacatgatagaggaggtccttatggatatattaaagaaaattgaacagtacagagaggaagagcagcggctgaaatgggaaggaactttcgccgattatttggagattattaaagaaaatccgatggtcgcgcaatctgctcattctcgagtttttaatatgataaaagacagcgggatagaggagattgacgggcgcaagaagtacagtttttttgaccgcgagctgttcgggcttgaagaatctctggagcgtcttgtggaagagtattttcatccggctgccaaacgtctagatgtcagaaagcggattctattgctgatggggcctgtgagcggcggtaaatccacgctggtcacaatgcttaaaaaaggtctcgaagcgtacacgctgacagataatggcgctgtatatgcgattaaaggctgcccgatgcacgaggaccctctacatttaatcccccatcatttacgcgatgacttttacagggaatacggcattagaatagaaggaagtctttctcctttaaatgtcatgaggctggaggaagagtacggaggaagaattgaggatgtgaaggtggagcgtatcttcttttcagaagataagcgtacgggaattggaacattcagtccctctgatccgaaatctcaggatattgccgatttgacggggagtattgatttctcaacaatcgccgagtacggttcagaatcagatccgcgtgcttatcggtttgacggagagctgaataaagcgaaccgcgggatgatggagtttcaggagatgctgaaatgtgatgagaaatttctctggcatttgctttccttgacacaggaagggaattttaaagctgggcggtttgcgttaatttctgctgatgagctgatcgtggctcacacgaatgaaacggagtttcgctcatttatttctaataagaagaatgaagccctgcactcaagaatcatcgtgatgccggttccttataatttaaaagtgtctgaggaagagagaatttatgaaaaaatgattgcagaaagcgatgtggcggatgttcatattgccccgcatacgttgaaggtcgccgcgatgttctcaatccttacccggttaaaagagccgaagcggtcggatattgatctggtcaagaaaatgagactgtatgatggggaaagtgtggaaggatataactctgtcgacgttgaggatatgaaaaaagaatataatgatgaaggcatgagcggaattgatccgcggtacgtgatcaaccggatttcttcaacgattatcagaaaaaatatggaatcgattaattctctcgatgtccttcgctccttaaaagaaggtcttgatcagcacccatcaatttcaagcgaggacagggagcggtatttgaattttatttctgccgcccgcaaggaatatgacgatattgcgaaaaaggaagttcaaaaagcgtttgtttattcatatgaagaatcagcaaaaacacttatggacaattacctcgataacgtagaggcctattgcaataaaaacaagcttcgtgatcctttgacaggagaggaaatgaaccctgacgaaaagctgatgagatccatcgaagagcagatcggcatttcggaaaacgccaaaaaagcgttccgcgaagaaattttaatccgcatctcggcctatgcgagaaaaggcaagcggtttgattacaattcccatgaaagactgcgtgaagctattcagaaaaagctgtttgctgatctgaaggatgtcgttaaaattacgacctcaacaaaaacgccggatgagcagcagctgaaaaaggtaaatgaagtcgtggcccgtttaattgatgagcacggctacaactcgacgagcgccaatgagctgctgaaatatgtcggcagcctgctgaaccgataagcaacgtgacccgtccgaatagggcgggttattttgtcccattttctaaatagtttgtcaattaaacgtgcatatgtgcatatgatgaatataaatcttttcaaaagacttgtttcataatctggcacaagccggaatacgtatgtatcacgaccacaaatggttaaggaggggaattcatgtcccaaaatgacagcggccattttttgatttctgaggaaaactggtccctccatcgcaaaggcttcgatgaccagcaacgccaccagaaaaaagtgcaggaagcgatcaaaaacaatcttccggacctcgtaactgaggaaagcattattatgtctaatggaaaagatgtagtgaagatcccaatccgttcacttgatgagtataaaatccgttataactatgataaaaataaacatgtagggcaaggagacggcgagagccaggttggagatgttgtggcccgggatggatcagacaaaaaacaagggcctggaaaagggcagggtgccggtgatcaggcaggcgaggattattatgaagcggaagtttcattaatggatttagaagaagcgctttttaaagaattagagcttccgaatctccagcaaaaagagcgggacaatatcattcatacagatatcgagtttaatgatatccgtaaaacagggttaaccggtaatattgataagaaaagaacgatgatgtcagcctttaaacgaaacgcaatgtcaggaaaaccgtcgttctacccaatttatccggaggacctgaaatataagacgtggaatgacatcacaaagcccgaatcaaaagccgtcgttttagccatgatggatacaagcggcagtatgggggtttgggaaaaatacatggccagatgcttctttttctggatgacccgttttttgcggacaaaatacgagactgtggaaattgaatttattgcccatcatacagaagcaagagtggtctcggaggaagattttttctcaaagggagaaagcggcggaacaatttgttcttccgtatatcggaagtcgcttgagcttattgatgaaaagtacaatcccgcccgctataacatttacccgtttcatttttctgacggtgacaacctgacatctgataacgcgcgctgtgtgaagctggtcaatgatattatgaagaaggccaatctgttttgctacggcgaggtcaatcagtacaacaggcattcaacgttaatgtctgcatataaaaatgtaaaagatgagaaatttaagtactatattttaaaacagaaatctgatgtttttcaggctctaaagaactttttcagaaatgaagagtctggtgtaagccatcaattttcgtaatgaaaagcccatttcagggcttttttttatttaataaaagcaagaaaacgcttgcgaaaaaaatacgggagaaaaagaaatttttcctttgacaaatcttctttcatttattaatattttatcttgtgaactattattgaggaatgaggtgaaaaggagttgactgaatcagaacgtgctttgctcacttttgaacagctcttcgatacgtctcgggcgatatataaaaaacagaagaagatattggagattgtgcttgagccttttgatattacagtccttcaatatttgctgatgtttaaaattcatcaaagcggaagcaccccgctaagcaagctggcaatgtcgcttgatcttaagcctgcttctgtgacgcggatgacagatattctgtataagcgccaattgatgaatcgatatgacagtccggatgaccgccgtatcgtcatgattcagttaaccgaagagggggaagaactgatagaaaaagccgctgtgcaatatgcaaaaatgggtgctggcttgtaccaaaagcttgatacctcccagctgcagtatttgcgcaaactagccggaagcttaacgaagcttgctgaaggctgttcagaaaaaagcggtaattaaaaacttctcacatattttcaccagctttccgcaaaatgatagaggatgaaacgaaaggagaaaacaaaatgaacagaggacgtttaattctgaccaacattatcggtttgattgttgttcttgcaattatagctggaggtgcttactactattatcaaagcacaaactacgtaaaaacagatgaagcaaaagtagcgggcgatatggctgctattactgctccagcggcaggtaaagtatctgactgggatctggacgaaggaaaaacagtgaaaaaaggcgacacagttgcaaaaatcaaaggcgaacaaactgttgacgtaaaatccattatggatggaacaattgtgaaaaacgaagtgaaaaacggacaaaccgtacaagctggtacaacaattgcacaaacgattgacatggacaacctatacatcacagcaaatattaaagaaacagatattgcggatattgaagtaggaaatagtgtagacgtagtagttgacggagaccctgatacaacatttgacggtactgtagaagaaattggctatgcgactaactcaacttttgatatgcttccatctacaaattcaagcggaaactacacaaaagtaacacaaaaaattcctgtgaaaatttcaatcaaaaacccatctgataaggtgcttcctggaatgaatgcatctgttaaaatttctgagtaaaacagatcagtcatcaaaccatgaaaggaggttgtcttagatggctacaggcaaagaaaaaaatgcaaaaaaccctatgtcattgctgattgtgctaatggcgggtttatttttggcaatcctaaaccaaacactgcttaatgttgcaatgccgcacttaatgactgaatttggcgtaagtgcaacgacgattcagtggcttacaacaggttacatgcttgttaacggtgtattgattccgttatctgctttcctgattacacgatttggccaacggagtctctttctcgtcgcgatgttttgttttacgctcggtacgttagtctgcggtatcgcacctaacttctctacaatgctgatcggccgtttgattcaggccgtgggcggaggtatcttgcagccgctcgttatgacaaccattctgttaattttcccgcctgaaagcagggggaaaggaatggggattttcgggctagcgatgatgtttgctccagcggtcggcccgactctttccgggtggattattgagcattatacatggcgcattatgttttacggtcttgtgccgatcggcgcaattgttatcattgtggctttcttcatctttaaaaatatggtggagccgcaaaaaatcaaactcgatactcttggcgcaatcctatcgattgtcggattcgcctccttattatacggagtcagtgaagccgggtctgacggctggaccgacccgattgtattgtctacagttattatcggagccattgcaattgttgcttttgttgttcagcaattgcgtcatgatgatccgatgcttgatttcagagtgtttaaatatgacattttctcactctcgagtgtcattaatatcattataacagtggcactttacactggtatgttccttttaccgatctatctgcaaaacctggtcggctttacggcgcttcaatccggtctgcttctgcttccgggtgcgatcgttatgctgattatgtcaccgatctcaggtattttgttcgataaattcggaccgagaccgcttgcgattatcgggcttctcgtgacagtggtaacaacatatcaatacacgcaattgacaattgatacaccatatacacacatcatgctgatctattcaattcgtgcatttggtatgtctctcttaatgatgccagtcatgacagccgggatgaaccagcttcctgcccgtctgaacagccacggaacggcgatgagcaacacgcttcgccaaatcagcggatcaatcggaacaagtttaattacgacgatttatacaaaccggacgacattccattattcacaaattgcagataaaacaagcacggcggacccgaacttcctccatgcgttccaaaatgcagtttcgaatttaatggtgaatatgaatgtgtcttatgatacggcgaaaacatatgtgtactcacatatttataaacacgcgtcactcgattccaatgtcatggggataaatgatgcctttatgtgggcaaccttattctgtgtagcaggtttgattttaagtatcttcctgcgtgacgtcagaaaagataaattgcgtaagaagaaaaaagaggagctttcattacttcctgctccaaaagaagctaaggaatcttaatctgtacagggaggtttcctgaatgaaaatttatgtagtgtatgatagtgaaggcgaacatactaaagtgcttgcagaagcgattgctgaaggcgcgagagaaaacgacgcggctgaagtgttcatcgaccatgtagatcaggctgatatccgcaagcttaaagatatggatgcgattatttggggatgcccagggcatttcggaacaatcagctccggtcttaaaacttggatcgacagacttggctacttgtgggctgaaggcgagctgatcaacaaagtcggtgctgtcttctgcacaacggcaacaacacacggcggcttggaaatgacaatgcacaatttaatcacgccgatgttccaccaaggcatgattgttgtcggactgcctggcaacgtgcctgaaaacgcactttatggctcttattacggagcaggtgtcacttgtccggtagacagtgatgagttaatgtctgaggaaggtattcagcttggacgcgcgttgggaagacgtgtcagccaagtcacaggaaacctaacagcaggacagtaaggagaggttgaaatggccattattatagcaataattgctgctgtcattgtcattgcggcccttattacatttaacgtccgcaacgcctcacctggacctgagaagcaagaagcaaccgatagaatcgcacctccagaagagggaaaaaacgaagcgcattaccctgctgaagcaagggctgccgagcatacgccatccgttgtcaaaaacgattctccaaaagagaagcgtgacacaatgggtgatgatatttacaggcaggcgctgcaaaagtttaagcattctgatgaagttcatgcagaagaagaggtcactgaggaaagtgacaaaatgcaggaccgcagctatcgtgatgcgctgctctctatgaaaaataagaaaaagtaatgaaaaaggcaaatccgttttctcatgcgggtttgccttttttgctgtttccatcaattcggtttttatcaaataaatccatggaatatgttgtattccatcttgatctagtgtactatgttactcatacaccgagggttttttctgggaggtaaagacatgaattcttttttaggtttattaaagaaagatatcaagctttcaagaatgtggctgctagtatggatatgcggaatcattttcttattgggaacaggccatattatagcttctcgcacgaaagaacctctagtcatttttggtttttttgttgcagttgctttttttctgcttttcttatctcctgtttttgtgttttatcaccttcgcaaggaagggaaatcacagctttggctgtacaatccaaatggcggcttctggctgttttcttctaaattggcagcatctttgctctatcaatttgtgattcagttggcattaacagcctatggcatatggatgtatcatatgctctctgtaaaaaatctgctggagcatcaagttgatataacgagtacagtggctttgctgaatatgtatgggcttatttcttcgttagatatgtcagtaacagtcattgtgttttggactgtttttcactctctcagaaattggcgcagaatgcggtgggctgcgatggttctgttggttgcagtgtggttattcttcgatgaatacatcataagccctttggttgaatctcaaaagcatttctggcctgtaacagtctattgcaattttgatttccacttctacaatgtttggagattggaattaaaacctatccatctgtctgtgctagggtttcctattactttagtcatcacattcttgctgctcattatggcttcaaaactgcttgatcgtaaagtagaggtgtaaatatggacaatcaattccaatcctcgaaaccgatttatctgcagatcgctgatcagatcttttataggctggtcaggaaggagctgctcccaggagacaagcttccttcagtaagagaaatggcgattcaaactaaggtaaatcccaatacaattcaaagaacttacagtgagatggaaaggctgggtattgtggagacaagaagaggtcaagggacgtttattgcggaaaaagcagaaatcgtagacgagctgaaagacaagctgacacgagaggtgctggaaggctttgtcaagcaaatgaaagagctggggctaacgaaagaggaaatggtagaagggattaaaacattcacagagggaggctaaaatgggaatcaagctagaacatgtatcaaaaaaatacggccgccatacggccgtcaatgatgtgtcaatcaccctatcatccggacggatttatggcctgatcggaccgaacggcagcggcaagtcaacgaccctgaaaatgatggctggccttctgtttccgacttcaggatttgtgaaagttgatgaagagcaggttacgagagaaatggtgcgtcaaacggcttatcttactgagcttgatatgttttatccgcatttcactgttaaagatatggtgaatttttatcagtcgcagtttcctgattttcaaacagaacaggcttataagctattgaatgagatgcagctgaatccggaaaaaaagatcaaaaagctatcaaaaggaaatcggggccggctgaaaatcgttcttgctttagcgagacgggcagacgtcatcttgcttgatgaacctttttccgggcttgatccgatggtcagggattccatcgtaaacagccttgtgtcgtacattgattttgagcagcagattgtcgtgatcgcgacacatgaaattgatgaaattgagactttgttagacgaagtaatcatcctcgccaatggagaaaaagttgcgcagcgtgaagtagaagatattcgtgaacaggaaggcatgtctgttttgcaatggtttaaatcaaaaatggaagtttgctagaaagaggaggaatatgatgaaaacagtgttggaattgaaaaacgtgactaaaaacatcagaggccgaacgatcattgatgatctcagttttacgattcgtgaaggcgaggtattcggttttttgggaccaaacggagcggggaaaacgacaaccatccggatgatggtggggttaatgaagctgtcgaaaggtgatgtcctcatttgcggccaatcaattacgaaagaatatgccaaggcgattaagcatatcggagcgatcgttgagaatcccgagctgtataaatttttgagcggatataaaaatctccagcaatacgcaaggatggtcaagggtgtcacgaaggaaaaaattgatgaagttgttgaactggtcggtttaacagacagaatccacgacaaggtgaaaacatattctctggggatgagacagcgtcttggcttggcacaatgccttctgcacgatccaaaagtgctgattttggatgaaccgacaaacggccttgatccggcggggatcagagaaatcagagatcatttaaagaagctgacccgagaaagaggaatggctgtcatcgtttcaagccacctgctgtcagaaatggaactgatgtgtgatcgaattgcgattctgcaaaaaggaaagctgatcgatattcaaaatgtaaaagatgaaaacattgatgagaacgatacatatttcttccaggttgagcagccgaatgaagccgctgctgttttaaatcagtacgatttgctgagtaagacaaatggtgtagaaatcaaactggctaaagacgaagtccctgcggttattgaattgctggtgatgcagcaaatccgtatttatgaggtcaaggtcataacaaaatcattagaggaccgtttcttagaaatgacaggtgaaacaaaagaggaggttcagcatgcttaatttgatttataatgagtggctcaaaattttcagccgtgccggaacatgggtgatgatcggaattctggggctgacaatggttggatttgcatttttagcgaatcatttttctgctggtgaatcaaattcccattggaaacaagaacttcaagcacaaaacgccgaattaaagaaagaaatcaaagaagatccttcactgaaagatgggtataaagaaacaatcacactcaacgactatcgcatcgagcataatatccctagtgacacgggctatacggtatggtcttatgtaacggattcagcaaactttaccatccttaccggtctgtttactattatcatcgcggccggaattgtcgcgaacgaatttaattggggaacgattaagctattaatgattcggccgctcagccgttttcaaattttgatgtccaaatatattacagttctcctgtttgggctcctgttgctgttgattttatttatcggttctactttattagggttgatcttcttcgggacgggtggtgaaaccgccgcgaatattcatttaatctataaggatggccatgtcattgagcaaaacatgatggggcatttggccacaacgtatctttctgaatccgtctcagccttaatggtggcgacgatggcgtttatgctgtctgcagtattcagaaacagctcacttgcagtagggttttccatctttttattggttgccggtacgactgccactgcatttattgcagcgaagtttgactgggcaaagtatatattgtttgctaatgtcgacttgactcagtatgtggatggcacaccgttaataaaagggatgactatgacgttttctatcgtcatgctggcgatctactttatcatcttcttgttgcttgctttcggaatcttcatgaagcgggatattgcaaactaataaagaaagctgttttgcataagcaaaacagcttttttgtcaaaataaaaactgcaggtttgcacctgcagtttttcatatcaatttatgcttacgcttctttagtaacgttagcagcttgtggtccgcggtttccttcaacgatttcaaaagaaacagcttggccttcttctaaagttttgaagccttcgccttgaatagcagagaaatgaacgaatacatcgtcttgaccttctacttcgatgaatccgaaacctttttcagagttgaaccattttactttaccttctaacatgaaatttcctcctaaagcgatcataacgcttaaattcactattcttgctcttaacaaactttcaagacgaaaactcttacaaaactttcttcttaaagatagttcgaacaaaaataattacctttactctaccagtaatcttcagaaaaaacaactgcttattgaaacttttttcggaaaataccatatttatttttcaatttgatatttatttgcggaaattcatctgctttctcgatatgtgatcatacgtttgccttagtattccttcattttgggaagataagtaataggaattgacaaccttattggatatgagtaaggtaaaagttaatcaatattacaaatgacaacgtttatcaactaagagagcgtatgatttttatgtctgatattgcttgcatgctctaatacatagataggagtatggtcacaatgaaaaagtggcttatatgcagtttcgtccttgttcttctcgtttcatttactgcatgttcaccgtctgcagaacatgaatcgataaaaatcgggattgctgagtctgacggggcaatatggaactatattgctcaaaaggctgaagaggcagggctggatattcagctgatccctttttctgattatgcggagtctgatatcgcacttgctaacaaagaaattgatgccaacgcctttcaaaccatttcatattttcagtcgttcacccaaaaatacaaacttaatttgacgccgctcgggacgacatacataacgcccatgggcatttattcaaaacgatatgaccgaatccaagatataccgcgaggagctgtcgtttctgttccggataaagcgttcgattttggcagggcgcttacagtgctccaggaagcgggtttgctaacgctgaaaaacggatttaacggaacaggttcagttgatatgattaaagataatccgagacacctgaaattaaaagctgtccggcaacaggatgcagtgagcggtgccgacgtgtttgtcatgaaaccatcagaagcaaaaaaagcgggcctgaacccgaaaaagcatacgctaaagagcggcggactcatgtctgaggaagagatgaatttgattgttgtcagagcggaggatcaagatcgggaagcgctgcaaaccattcttgagctttatcaagcagatgatacagcggcatttatagaaaaagaatatcagagagatcttgtcccggcttttctgcctttgaaacgtctttcagattggaagaatgaattcgaacattgaattcattcttttttttctgaaaaacacactctgttccgtcccgtttctttcgctttgtaaagcatttgatcggcaagaatgggcaaggatcctggctgttccgtattattggggtaatgagcggcccctagtgatatcgtaactgaaagctcttcgccgtttgttaatacaatcggtgcatcacttacagtgctcctgatccgttcagcgatccgggctgctttatcaagagaacagttcggcaggagaacggcaaattcttcaccgccgatccgagcggcaggatcagtatttcggatgctctgcttcagacgtaaccccagctctttgagcacctgatctccttcatgatggccatattggtcattgatggtcttaaaatgatcgatatccatataaatcagtgcaaattgaaaatgcggggtatcggccgcctgctgatacagagcttttgtggtttcttcaaactttcttcggttatacacgcctgttaaaaagtcaaagtgcgcctgaaacttatattgtttaaaaagaagatgtgcatttgtttcatgatcaataatatataaactgagcatgccgcccgctattgatatgatccaaaaatacaaatgaagttcgtatgaatgtaaatctataagaaaataaaaggaaaaggagatcaagctatttgtgattattaaaagatagaaagcatgttttagttgaactttttttcttctagaaacaatgagtgacgggatggcagcgatacaaatgataataaccgagtatagtgcagatgtgttcattgtaatcagcaagcggcctgcagtgatcatggccagggccgttgccgttgaaacccagcctccataaagagcggcaatcataatagggatatttcgaagatcaataattgaatgctgataggtaaatccaaaaaccatcagaataaccccgagcaaaccgcaggccagtcctttaacagcttgaaaggatatgctgtcttttttatgtactagcctttctttaaacaggtgggtgaagagataattaaatgtgattaaaatggtcaaatttacaaacagttctttcagcaaatattatcacccttatataaggtactaaagatggaagggaaagaaaagaaaaaaaaaggcattatataaggtttttttacttgaattgataagttaaaataattctcacttgacccatcggaattagtgtaatatagtaaatgagaaaatttgaagggagagtttacctgctttggagactttactggttgtattacatgtatttattttatttttacttatcttagggctctttgttatgcagaaaaaacatgtttccttctctaaacgtgtatttactgcgctggggctgggaattgtattcggatttgcgcttcagctgatttacggcccgacttcaaatatagtcattcaaacagccgactggtttaatattgccgggggcggatatgtcaaattgcttcagatggttgtcatgccgctcgtctttatttcgattctcggcgcatttacaaagctgaagctgacaaaaaatcttgggaaaatcagcggtttgattatcgggattttagtagcaacaacagccgttgctgcagctgtcggtatcgcgtccgcgctttcatttgatctgcaggcgattcaggttgaccaaggaagtacagagctttcacgggggcaggagcttcagcagaaatcagaggatatgacagcgaaaacgctgccgcagcagattgttgaactgctgcctggaaacccgtttttagatttcacgggagctagaccgacttcaacaatcgctgtcgttatttttgccgctttccttggagtggcattcctcggcgtcaaacacaaacagccggaacaggcagaaacatttaaaaaactggttgatgccgtttatgccattgtcatgcgtgttgtcacactcattttgagactgacgccttatggggtgctggcaatcatgacaaaaacaattgccacgagtgatcttgacagcattttaaaactgggcatgttcgtgattgcttcatatgccgcgttaatcactatgtttatcattcatttgctgctgctgacgttcagcggcttgaatccgctgatttatttgaaaaaagcggtgcctgtacttgtatttgcatttacgtcaaggtctagcgcgggtgctttaccgctgaatattaaaacacagagaagcatgggtgtaccagaagggatcgcaaactttgccggttcgttcggtctttcgatcggccaaaatggatgtgccggcatttatcctgcgatgctggcgatgatgattgctccgactgtcggccaaaatccatttgacccggtgtttattatcactgttatcgcagtcgttgccatcagctccttcggggttgccggagtcggcggcggagcgacattcgcggcgcttcttgttttatcatcattaaacatgcctgtcgcgctcgccggtttgttaatctcaattgaaccgttaatcgacatggggcgtactgctttgaatgtcagcggaagcatgacatccggtcttattacaagtaaggtcacaaaagaaattgatcaaggggcatttcatgatcaatccagagtgattgaagctgaagaagcgtaacatatgaaaacgtgtaatccaagaggattacacgtttttttaacggccgggttctaaatcctccagcatttccatcatcgtgttgtcgtccatgacattcattgcgctttgttcaaaatgaatgggttcagcataatgcggctgtctttttttcgcggctgactcagtttgcctagtttgagactgtgtatgctgatgcagtggttgctgctgtccagcgtgctggtgctgacggccattttgccgctggctttgatgctgcgaacggtcctggttatcaccgctgcttccgctgcttccgctaaatgcttgtttgaccatgtttcctacattagaagcatcaaacgtgttattttctgaatttcgtctgttcatttgtcctgtgataaacccgctaattctttggcggatctgaggtgataatgcagcaataagcatagttgatcctatgatcaatgctgcggggctgattcctcttcgctggttgaacaacatgatccctcctttgcagtgtattcatattttccccctcgttagacaaattaaccgttatatttcccgggaaagcatttcctccagatttgcatgcataattaaagccagttagaaaaacctataagtaaagtgataaaggaggaattcacatgtttggaaaaaaacaagtccttgcgtctgtgcttcttatccctttgcttatgactggctgcggtgtggccgaccaaggtgagggcagacgtgataataatgatgtaagaaacgtaaattatcgaaatccggccaatgacgatatgcggaatgtaaacaatcgggataacgttgacaacaatgttaatgataatgtcaataacaatcgtgtaaatgacgataataacaacgaccgaaaacttgaggttgctgatgaagcagctgataaagtaacagacctaaaagaagtaaagcatgccgatatcattgtggctggaaatcaagcctacgttgcagtcgttttaaccaatggaaataaaggtgcagtagaaaacaatctgaagaaaaaaatagccaaaaaggtaagatctactgacaaaaacattgataatgtttacgtttcagctaatcctgattttgtagagcgtatgcaaggatatggaaaacgtattcaaaatggtgacccaatcgccggattatttgatgaatttacacaaactgtacagcgcgtattccctaacgctgaataaataaaaaaagccgcacaatttgtgcggctttttctttgcgttaatgacacactgcgaactcaggctgcatagagtaaaaataaaaaggtacaagacggaccggctcagggagggagacgtttgcgggatggcataggaaagcgtgcggcatccgctctattcctgtgcggagtccttgtgatgctggctgtaagctcagccatcgtatcaagcgcgatgtatatcctgtcttttccaggtcaggcatctggaataacaaaagaacaagtgacgaagcacatgaagaaagagtcattcaaacaggccgatatttattacacttctaaggaaaagtccttactgccattgacgaaagaaacgcttgaatatgcggtcagtattaatcagattatgattggatattcgaatcaaaagcctattgacattattttttttcctaatgaaaaacagatggaggcttactccggtttattggatgtagttggtttttattctgagcgggagcagttgattggactgttgcctgaagagaaaaagaaactgttagaaggggacgaggtagcggtttatttgtaccagagattgttgattcatgaatactcgcaccatgcgtttcatcagaaattgaaggagcttgagacggatcccgatgagtttccgttatggtttcatgaagggttaagcgagtggattgcgaactatgaattgctcatagatccgatcacgttttctgtcgtgccctttgaccgtttgcagactgatcgagactggcaggaagccagagccgaatatgacactgatgtctatttgcaaagcttttatatgatcgatgagctgaccggcaaatacgggaaagacattatttcagaaatgattaaggaaacagcaaaaaaaggggactttgaaaaagggtttaaatcagcaacaaaggaaagtcttgatcattttgaaaaggattttaagaagaaatttgaaaaaaacagtgcggcattggatagtatctatccaatgcctttgttattagtgaagtccttgctgacccattccgccttgtgtcggaggcatttgtccttgggcaggggcgaatgaatttctcagctgttccatatcctgcgcatcaagctgaggaacctggtaatagccgtgtttgttttggtatagaaaaatttcaaatgccatttcaacatactcctgaatttgcgcagacagtacgcgtcttacggccggatttgtcatttccagagacgccatcgtcagcatagaagcttgtgctttaatcgcgcaaagcatttgtcggctgatgatgctgtcatcaatatcattcatggattgaacaggttttttaggctgtgacggctgcatgccgtaaacagcctggttgtcctccttcatcatataagttgctgttttttgtgaaggttcgcttcctgttttgaagcattctgcagttatattgtattgagatgtaatgaattgatgttgacgatcaaggatgtttagtaattcttgatccttacagaattgtctcagcatcatatactgatcaagcacagtaagtgttccggaaagcacctcatgcatatcaaacatttcatgtccgccgtggtttttatgcggtttgccaggaatacctttgttcatttgggattgctgctgctgattgaactgatccaaaccgaattcctccttttttttcagatcaactgtattttgtgtcagtctgccgtgtattatgcagaagcctgaaaggaattatatgctgtctgtcgaaatgataagcagacaaaatcgttgtcattatgtgtatattaagggaggaaatatgatgaggcgtattctgcatattgtgttgatcacggcattgatgttcttaaatgtaatgtacacgttcgaagctgtaaaggcagctgaaccgcaacagcctatatcgattgagaaggcaatacagcaaaaagaaggacaggcgcttgtcgaaggatatgcagtcggccaggctgtttccccgcagcattataagctgacaagccctttctcaaatgattataatgtcgcgctggcagaccgtaaaaatgagacatcgcccgaacacatccttcctgtgcaaatcccctccgccttcagaagccaatttgggctgcaaaccaatccgcttcttcttgggaaaaagataacggttcaaggaaagcttgaaaattactttaacacgacaggacttaaaaacgttcagtcgatgaacgtaaccgatgacacgaaaactccgccggctgaacagccagtgaccataaatgaagcacggggaaggctgaatgaagaagtaacgataaaagggatcattacagctgatcaaaacgcaatcggaggcgggaagctgtcgacctttttgcaagatgaaaccggaggcattaacatttattcgccatcccctgaacaatttcccgaattaaaagagggtatggatgtcacggtgacagggaaaatcacgtcttaccaggggctgaaagaaatcgttccaagctcatcaggcatcaaaatcaaccagtcaaatcaatccctccccgccccaaacacttaacaatcaatgaacttattaacggcagcctaggtgatcagtatgaaggacgccttgtgaaactaactgcttttgtttccttaattccaagttctcctgccggcggcggttacaatgtaacaatgattgatgacgaccatcatgcaatgacgctccgggttatgaatgaaacaggggtgataaacgagcttgatgagggcaaatggtatgaatttaccggtgtgttaagcagataccaaacctttcaactgcttccgcgaaaatcggctgacctgaagctgcttgaagagcagcccgcacctccgtctgcggagggagaatatgaagggattgttgaccgggttgttgacggcgataccattcatctcaaatctccggtgcttggaacgacaaaaatccggtttgtaaatgtagatacacctgaaacatatcacacaccaaaaaatgacgcagatgaaaatcaattaagatttggcaaaaaagcatctgactatctaaaaacggttctgtccccaggtgataaaattactgtcaaggtcgggagtgaagccaaggacagctatggcagactgctcggacaagtcataaccgaatcaggatcaaacgtgaacttagagcttgtaaaaaacggctatgctccgacgtattttatttggccggttgacaatgaagaggattatcagcaatttcaggccgcagtagccgctgcaaaaaaagatcaaaaaggaatttggaatgaaaacgatcccctcatggaaatgccgtttgaattcagagccagagagcaagggaaaggcctgacaagatatgtggggactcgtcgaataaaacatatgtgcagccagctgactggaagaagatagctgtggaaaacagaattttcttcgcttcagcaagtgaagcggagagcgcgggatataaaaaaaggcaaacggcacctcaagaacatgtgccgcttagaattctcagcatgaatgatttgcatggcaaaatcgatcagcaatacgagcttgatcttgatggaaatggaattgcagacggcacgtttggacgcatggattatgccgccgcatatttaaaagaaaaaaaggctgaaaagaaaaactcgctgattgtgcacgcgggagatatgatcggcggaagttctccagtttcctctcttcttcaggatgaaccgactgtagaactgatggaggacatcggatttgatgtcggaaccgtgggaaaccacgaatttgatgaaggcacggatgaactgctgaggatcttaaacggcggtgatcatccgaaaggcacaagcggatataatggacagaactttccccttgtatgtgccaattgtaaaatgaaatcaactggagagccctttttgccggcttatgacatcataaatgtggagggcgtacccgttgcttttatcggggttgtcacacagtcggcagctggcatggttatgcctgaaggaataaaaaatatcgagtttacagatgaagcaacagcggtgaataaggcggccaaagagctgaggaaaaaaggcgtgaaggctatcgcggttctcgcacatatgtcagctgaacaaaacggcaacgccattaccggtgagtctgctgatcttgcaaacaaaacagattctgaaattgacgtgatttttgccgcgcataatcatcaggttgttaacggtgaagtgaatggaaaactgattgttcaagcgtttgaatatggaaaagcgataggtgtcgttgatgtagagatcgataaaacgacaaaagacattgtcaaaaagtccgcggaaatcgtatatgttgatcaaagtaaaatcgaaccggatgtcagcgcgtcagccattttaaagaaatacgaaacaattgcggaaccgattatcagcgaggtagtcggcgaagccgctgttgatatgggaggggggtattcaaatgacggcgatacacctcttggaaacctgattgcggatggtatgagagctgccatgaaaacggattttgctcttatgaatggcggcggcatacgtgaagcgctgaagaagggcccgattacgtggggagatctttacaatattcagccgtttggaaatgtgttaacgaagcttgagattaaaggaaaagatttaagagagattatcaatgctcaaatctcgccggtttttgggcctgactacagcatcagcgggtttacgtatacgtgggataaagaaaccggaaaagcagttgatatgaaaatggcagatggcaccgagatccagcccgatgccacatatacattgaccgtcaacaactttatggcgacggcgacaggagccaaatatcagccaatcggactgctgggaaaaaatccggtgacagggcctgaggatttggaagcgacagttgagtacgtgaagagttttgatgagccaattgcgtatacaaaagagggaagaattaagctcgctgaagccagtgatattgaagaccctgtaacagaagacccgattacggaagagcctggagatgatccggggacggagcatccaatgaaagaggttccagagcctgatgtggatttgcctgatataaaagaaactccgggaacagcaccggttcatcagcttccgccttcagccatttcgagattcaatgaaataccaatcaacaacacaaaaaccgctgatactgctaatagcatcagcacattgccgttacaaaccgagactgcggaaagcgggtctgatcatcagcttccggatacgtcagcgggctactataactttatggtaatcggtgcggcggtgacattgtcaggaacttatctatatgtcagaagaaaaaggagcgcctccagaacgtgaaaaaagttattccactattcatcattgctgccggcctagtgatcgcaggctatggaggctttaaattaatcgatacgaatatgaaaacggaacagacattaaaagaagcaaaactggcggctgaaaagccacaggaacttttggggacgaaaaatagcacagatcaagcaaagaacaaagcatcatttaagcctgagaccggccaagcgagcggcattttggaaataccgaaaatcaatgcagagcttccgatcgtggagggcaccgatgctgatgatttagaaaaaggtgtcgggcattacaaggacagctattatcctgatgaaaacggacaaattgtgctgtcggggcatcgggataccgtgtttcgccggacgggagagctggaaaagggggatcggctccgcattctcctgtcatatggagaattcacatatgaaattgtaaatacaaaaattgtcgataaggatgacacatctattatcacgctccagcatgaaaaggaagagctgattctgacgacctgctatccgttttcatacgtcggaaatgccccgaaacgctatattatatatggaaaacgagtgacttaaaaagccgaggcagtgcctgcggcttttcttcatgaaaaatatgtgcggcaaaggtttttcatatcagcagggaaaggggcttcagcaactatgagctcgtctgttatcgggtgaaccgcttgtactttattggcgtgcagtgcctgcctgtttagcagcttgctcccgcctccgtaaagcgagtctcctgtcaacggatggccgaggctcgccagatgaacacggatttggtgtgttctgcctgtttccagctctaattcaacgagcgacagccgttctttcgcattgctggccattaccttgaaatgagtgacggcagtttgcccgcctggtgaaacccggcgtcttgtcgggtgtgaccggtctctgccgattggtgaattaattgtcccttttttcgtccgtagcttaccttcagcgatggcggtatacgtacgcttcagcgtctttttctctaactgctggtctaagatggcgtgtgccaaacgatgcttggcaaaaacgatagcgccagatgtatcctgatcaagacgatggacgtggcgcaccttacatgtttcgccatttatctgataatgataagcgatcaaattagccagtgtgccggtttgcccatcctcattcggatgcgtcgcgatgccagcgggtttattgacgatgagcatatgattgtcctcatataaaatatcaagctcgccatactccggaatgaccgaagatgcttcactttcctgaagatcaatgaacacacggtctcccttttttacaatcatattgtttaagacggattcgtgattgacctttatctgttgatgggacatccagtcttgtatcactggtttagaagctttgagcgctgttttgagtacggaaaacagccattggccgtcctgtttttcattgatgaggatctcaagccctctgcctttttggttcatgttaaatggctccttttcgaagcggaaggctgctgtttctcataggaaacacttaccttagctttcgcgtttttttctgtgctattcttgagtaagacttaggatattcgatggcaagaaaggtgattgacgtgagaattgtgaacgcagcaactgcagaacaggagagctttatcaaggagctgtctatggagctgatccatgatgtatttcctctttatttctccgaactggacattcagcgctttaaaaagaaaggcgttctgtctttaaataaccattattaccaaggaacattaaaagaagcatttcaaattatggcttgtcttcaaatgatacatattatcctgaccaagccttcgccgcactctgatttgagtgatcaggcgatttttgaaaaaaacagcaagatgctgaatgattttgggatttattttccgtttgctttttctgactttcaaaagaagactaacaaagcctttttcggtcaaagaaggctgatataatcatgcggcaagggcttttctatttttagaaaagctcttttttgtatcagagaaatcatatcataaaacctttcctctaactccctttttaaacggctcgtgtctgaacatactaatgattgaaaggggtgctgacaatgagttcagttaaagatacaatgacaacgcaggtggcaaccgtttctccgaatcaaacgattcaggaagcggcttctctaatgaaacagcataacgtcggggcgatccccgttgtagagcaaggtgttttaaaaggaatgctgactgaccgtgacattgcattaagaactacagctcagggccgtgatggccagacacccgtttcagaagtgatgtcaacagaactcgtatcaggaaaccctaatatgagtctggaagacgcgtcgcagctgatggcccagcaccaaatccgccgccttcctattgtagatcaaaacaatctagtcgggatcgttgcgcttggagacctggcagtcaatcagatgtcgaacgagtctgcgggatcagcgctgacaaacatttctcaccaaaacattcattaataagaaagagcttgcagtgtgcaggctctttcttcacataaaaccttactttttgaaagcagacttgtttcggggtatagtgagtgtatacatatgtctcaattcgtactaaaggagttgtacccagtgattaaagcgttaatttttgattttgacgggcttattctagatacagaaacacacgaatatgaagttcttcaggaaatatttgaagagcacggctcagtgctgccgctatctgtctgggggaaggtcatcggaactgcagcgggtttccggccttttgactatttagaagagcagatcgggaaaaagctgaaccatgaagagctcacacaattgagaagagagcggtttgccaaacgcatggaatcagaaaaagcgagacctggtgtcgaagcgtatttgaatgcggcaaaggatttaggcttaaaaataggccttgcctccagctctgattataaatgggtgtccggccatttgaagcaaatcggcctgtttgatgattttgaagttattcaaacggctgatgatgtggaagaggtgaagccgaatcctgaactctatttattggcggcaaagaacctgggggtatcgccagcggaatgtctcgcgtttgaggattctgtcaatggttcgattgctgcgaaacgtgcaggcatgaagtgtgtcattgtcccgaataaagtaacgggcaccttgatgtttgaagactatgatcacaggcttgaatcaatggcggagatggagctcgccctattgcttgatcatctgaactcacaaaactagaaaggagcgagtaggttgtctgagaaattagatttgacccggtttgaaaagaaaatggttatccgcaatatcgaagagaaagacatcgacaagattatcgatcttcaaaaggactgctttccaggaatggagccttggaagcgggagcatttaatcagccatttggagcattttccagaagggcagttttgtgcagaattcgaaggtgaaattatcggttcgtgctcaagtctcctgattaactttgatgaatatgatgaccgtcatacatggcaggacattacagatgacggttatatcaccaaccataatcctgacggcttgaatatgtatggaattgaagtcatggtggacccgaagtacagacgaatgaagattggccaccgtttgtacgaggcgagaaaggacttagccagacgcttaaacctgaaaagcatcatcataggcggacggattccaaactatcacaaatatgcagaggaaatgacagcgagagagtatgttgaacaggtgacacgccaccaaatttacgatccggttctttcttttcagctgatgaacggctttacccttatgcgaattaacccgaactatctcccggatgatacagcttcgatcaagtatgcgacgctgatggaatggaataatgtggattatctaccgcagcagacaaaacgctattataaatcggcgttccctgttagaatttgtgtgattcaatacgaaatgaagaaaatttattcctttgaggaatttgcgaatcaagtagaatactatgtcgatgttgcttccgacgcaagatctgattttgcggtgttcccggaaattttcacaacccagctgatgtccttccttgaggaacggtcaccgagcttggcggtgcagagaattactgagtatacagaagattacatcagcctgtttactgacttggctgtgaagtataacgtcaacattatcggcggatctcatttcgtcgaagaggaaggcaagatctataatatcgcttacctgttcagacgggacggaacgatcgagaagcaatacaaactccatattacgccgaatgaacgcaaatggtgggggatcagcgcaggagaccaagttcgcgtgtttgatacggactgcgggaaaatcgcgatccagatctgttatgacattgaatttcctgagcttgcccggattgcggctgataaaggagccaaaatcatctttacgccattttgtacagaagaccgtcaaggctatctacgtgtcagatactgttcgcaggctagagcggttgaaaatcaaatttatacggttatctctggaacggtcggaaaccttccgcaaacggaaaacatggatatccaatacgcccagtcaggcatctttgccccgtctgattttgaattcgctcgtgacggcattgtcggcgaaacaaacccgaatattgaaatggtcgtcatcggcgatgttgacctggaaattctcagaagacagcgccaaaacggtacagtgcgccagctaaaagacagacggcgtgatatttatcatattcaatataaaaaataattcccaaaaaacccgcctgaattggcgggttttttaaaacaaaagcggaattgtttaggtgctatctttaaaataaaagtaggtataatggagtttctgtattttcgccatttcctatatcatacagaaatcggctaggcttccattgctattgcaatggctgtccaagttgtttcgagtgcgacctttatcagtacgatgctgagcattgccactttgcctgttttgctttggaagctgcatcctctttcttcttgagaaagaggatattttattatttacgcggtttattgactctgacccggtctggctttatattgaaggcagggaaatcatcaccaagacatcacataaagagaaggtctgtttcaattgaattggcattatagagaacgctaatgaaatggagatgatggggatggaaaacattcagcaaaataagggattaaagcaaaaagatgagcaatttgtgtggcatgccatgaagggagtgcatcaagcggacagcctgatagcccagaaggccgagggggcctgggtaaccgacacagacggacgccgctatttggatgcgatgtccggtttgtggtgcgtcaacattggttacggcagaaaggagcttgcggaggctgcctatgagcaactaaaggagctgccttactacccgttaacgcaaagtcacgcacccgcaattcaactggcggaaaagctgaatgaatggcttggcggcgattatgttatttttttttccaacagcggatcggaagcaaacgaaactgcttttaaaattgcccgccagtaccatctgcaaaacggcgaccacagccgttataaattcatctcaagatatcgggcataccacggcaatacattgggagcgctctcagctaccggacaggcgcagcggaaatataaatacgagcctttgagccaagggttcctgcatgcagctccgccagatatataccggaatcctgatgatgcagacacgcttgaaagcgcaaatgaaatcgaccgcatcatgacatgggaattaagcgaaacgattgccggggtcattatggagcccatcattacaggcggaggcatcctaatgccgccggacggatatatgaagaaggtggaggacatttgccggcgccacggagcccttttgatttgcgatgaagtgatctgcgggtttggacggacaggtgagccgttcgggtttatgcactacggtgtgaagcctgatatcattacgatggcaaagggaatcacaagcgcgtatctgccattgtcagcgactgctgtgaaacgggacattttcgaagcgtatcagggggaagctccttatgaccgtttccgccacgtgaacacgttcggcggaagcccggctgcctgtgctttggcgttgaaaaacctgcaaattatggaggacgaacagctgattcagcgatcccgtgatcttggagcaaagcttttaggtgagcttcaagctctgagagaacacccggcagtcggggatgttagaggaaaagggctgctgatcggaatcgaactcgtcaaagacaaattgactaaagagccggctgatgccgccaaagtaaaccaagtggttgcggcgtgcaaagaaaaagggctgatcatcggcaaaaacggcgatacagtcgccggctacaacaatgtcatccagcttgcgccgccattttgcctgacagaagaggacctttcctttatcgtgaaaacggtgaaagaaagctttcaaacgatataatataaaagtgaattattaaaggagcacatgatgagttttcacaaccagccgatcttaccggctattcgcaatatgaagcaatttgatgagtttttgaacagttcattctcttacggtgttattcttgatattcatctcggccagctgaagggcgtgatcaaagaagcgcaaaagcacggaaagaacatgatggtgcacgtcgatctcattcaagggattaagcatgacgaatacggtgcggaatttatatgtcaggatatcaagcccgctgggattatttccacaagatcgaatgtgattgccaaagcgaagcagaagaaaatttatgccattcagcgcctgtttttgcttgatacaagcgcgatggagaaaagcatggagtttatcggcaagcataagcctgacttcatcgaagtgcttcccggcatcgttccgtcactcattcaggaaataaaagagaaaacagggattcccatctttgccgggggtttcatccgtacggaagaggatgtagagcaggcattgaaagcgggggctgtagctgtcacaacatctaataccaaattgtggaaaaaatatgaaaactttttgacggaaagtgattgacaccgctttcatgcactgatacaattgcactaggttaatacattgtgatggagaactcggagaccacagcagctctttacggcaaatgtttatgcacccgtaaagcggtttgttgtggtttttttattctcttcttctctatcatgctttttaatcgtgactttaggaggaatgtgctatgacagcattttggggagaagtcatcggtacgatgctgcttatcatttttggtgcaggtgtttgtgcaggtgtcaatttaaagaaatcgctttcattccagtctggctggattgttgttgtatttggatggggattgggtgttgccatggcggcatacgcggttggcggcatcagcggtgcccatttgaatccggcgctaacgatagcgcttgcatttgtaggagattttccttggaaagaggttccggtttatattgcggcgcaaatgatcggagcgatcatcggtgcggtgattatttatctgcattacctcccgcactggaagtcaacggatgatcccgctgccaagctgggtgttttctcaacagggcccagcattccgcatacatttgcaaacgttttaagcgaagtgattgggacatttgtccttgtacttggaatcttggccattggggcaaatcaatttacagaaggacttaatcctttaatcgtcggtttcctcattgtagcaatcggtatttctctgggaggaaccaccggctatgctatcaatcctgcacgtgacttaggtccgcggatagcccacgcttttcttccgattccggggaagggctcatcaaactggaaatacgcatgggttccggtagtcggcccgattttaggcggatcattcggcggcgtattttacaacgctgcatttaaagggcacatcacaagcagcttctggattgtaagcgttatattggttgtggtattgttaggactctatgtttatacgaaatcacattctgctaaaacattatcaaattcaaaatatatttaatcaaaggggagacatcttatggaaacgtacattttatccttagatcaggggacgacaagttcaagagcgattctgtttaataaagaaggcaaaatcgttcactctgctcaaaaggaatttacacaatacttcccgcatcctggctgggttgagcataatgccaatgaaatttggggctctgtcctcgcggttatcgcctcagtcatctctgaatcaggaatcagcgcttctcaaattgccggcatcggcatcacgaaccagcgcgagacgacggttgtgtgggataaagatacaggaagtcctgtctataatgcaatcgtttggcagtccagacagacgtccggcatttgtgaggaacttcgtgaaaaaggatataatgataaattcagagaaaaaactgggcttttaatcgatccatacttctccggcacgaaggtgaagtggattttagacaatgtggaaggcgcaagagaaaaagcggaaaaaggcgagctgctgtttggaacgattgatacgtggctcatttggaaaatgtcaggcggaaaagcgcatgtgaccgattactccaatgcctcaagaacactgatgtttaatatttacgatttaaaatgggacgatgaactgctcgacattctaggcgtaccgaaatccatgctccctgaagtgaagccgtcctctcatgtgtatgcggagactgttgattatcacttcttcggaaaaaatatcccgattgctggagcggcaggcgaccagcagtccgcattgttcggccaggcatgctttgaagaaggcatggggaaaaacacatacggcacaggatgtttcatgctgatgaataccggggaaaaagcaattaagtccgaacatgggcttttgacaacaatcgcttggggcattgacggaaaagtgaactatgcgttagaaggaagcatttttgtcgcaggctctgccatccagtggcttagagacggattgagaatgttccaggactcttcgcttagcgaatcttatgcagagaaagtggattcaactgacggcgtatatgtcgttccggcctttgtcggactgggaacgccttactgggacagcgatgtgcgcggttcggttttcggcctgacaagagggacaacaaaagagcactttatccgtgcgacactggagtcattggcttatcagaccaaagatgtgcttgacgcaatggaagcagattcaaacatttcattaaagacgcttcgtgtagacggaggagctgtgaaaaacaatttcctaatgcagttccaaggagacctgttgaatgttcctgtggagcgcccggaaattaatgaaacgactgcacttggcgcggcttatttggcgggtatcgctgtgggattctggaaggaccgttctgaaatcgcgaaccagtggaatctggataaacggtttgagcctgaattagaagaagaaaaacgaaatgagctgtataaaggctggcaaaaagccgtgaaagcagctatggcttttaaataaagtaatactatggtataatggttacaagttaataagaacggtcctgagatgaggagagaccacagcaccaaagtgtaagcatgcactttggctgttgtggtctctttttctatttaccgtgacaacaaggaggagacgtaatgatgaaacatcaattttcaagtcttgaaagagatcgcatgctgacagacatgacgaaaaaaacatatgacctatttattatcggaggaggaattacaggagccggaacagctcttgacgcggcatcaaggggaatgaaggtcgcactaagcgaaatgcaggactttgcggcgggaacatcaagccgatcaacgaagctggtacatggcggcttgcgctatttaaaacaatttgaagtgaaaatggtcgctgaggtaggaaaagagcgggcgattgtgtatgaaaacggcccgcatgtcactacaccggaatggatgctgcttccgtttcataaaggcggcacattcggttcatttacaacatcaatcgggttaagggtttatgacttccttgcaggtgtgaaaaagtcagaacgaagaagcatgctttcagcaaaagaaacgctgcaaaaagaacctttggtaaaaaaagacggcttaaaaggcggcgggtactatgtggaataccgcactgacgatgcgagactgaccatcgaagtcatgaaggaagcggtgaaattcggggcagagcctgtgaattactccaaagtgaaggagcttctttacgaaaaaggcaaagccgtcggcgtattaattgaagatgtgctgacaaagaaagaatataaagtgtatgcgaaaaaaattgtcaatgctacaggcccttgggtcgatcagctcagagaaaaagaccattcgaaaaacggaaagcacttgcagcatacaaaaggcattcaccttgtatttgaccagtctgtctttccgctgaaacaggctgtatatttcgatacacctgatggccggatggtatttgcgattcctcgtgaaggcaaaacatacgtgggaacaacagacactgtttacaaagaggcgctggagcatccgcggatgacaacggaggatcgtgattatgtcatcaaatcaatcaattacatgttcccggaactgaatatcactgcgaatgacatcgaatccagctgggcggggctgcgtccgctgattcatgaagaaggcaaagatccttctgaaatttcacggaaagacgagatttggacatctgactcaggcctgatcaccattgccggcggaaaactgactggatacagaaaaatggcggagcacatcgttgatcttgtccgtgatcgcttaaaagaagagggcgaaaaggattttggaccatgtaaaacgaaaaacatgccaatctctggcgggcacgtcggcggttcgaaaaatcttatgtccttcgttaccgcgaaaacaaaagaaggaattgcagccggtttatcagaaaaagacgcaaaacagctggcgatcagatacggctctaacgtagatcgcgtctttgaccgggtagaagcgctgaaagatgaggccgcgaaacgcaacattccggttcatattcttgctgaggcagaatacagtatagaagaagagatgactgcaactcctgctgacttctttgtccgcagaacgggacgtttattttttgatatcaattgggtaagaacatataaagatgccgttattgattttatgagcgagcgattccaatgggatgagcaggcgaaaaacaaacatacagaaaacctcaacaagcttttacacgatgcggtcgtaccgcttgagcaataaatcataacgggctgtctgcagcccgttatttctttttacgtggaaagggccagatctcaggttatcaagtgacagaggcacccgcttcatataaaataatggcataagctgatacataggaggacgaatatgacttggagaaagagctatgaacgctggaaacagacagaacatttagatccggaattaaaagagcgccttattgaattagagggagatgaacaggcccttgaggactgtttctataaagaccttgaattcggtaccggcggaatgcgcggggaaatcggcgccgggacaaatcggatgaatatttacactgtgcgcaaagcatcggccgggtttgcggcatacatctcgaagcaaggtgaggaagcgaaaaaacggggcgttgtcattgcttatgattcccgccataaatctccggagttcgcgatggaagcggcaaaaacacttgcgacacaaggcatccaaacatacgtgtttgatgagcttcgcccgacgccagagctgtcattcgctgtcagacagctgaacgcttatgggggaattgtagtaacggcaagccataacccgcctgaatataacggctacaaagtatacggggatgatggcggccagctgcctccaaaggaagcggacatcgtcattgagcaggtaaacgcgattgaaaatgagctgacgatcacagtggacgaagaaaataagttaaaagaaaaaggcttaatcaaaatcatcggtgaagatattgataaagtttatacagaaaaactgacgtccatttctgtacatcctgaattatcggaagaagtagatgtaaaggttgttttcacaccgctgcatggaactgcaaataaaccggtcagacgcggacttgaagcactcggctacaaaaatgtaacggttgtcaaagaacaggaactgccggattcaaacttctccactgttacatcgccaaacccggaagagcatgcggcattcgaatatgccattaagcttggggaggagcagaatgcagatattctcatcgcgacagatcctgatgctgaccgcctcggcatcgcggtgaaaaacgatcaaggcaaatatacagtgctgacaggaaaccaaaccggagcgctgctgcttcattacctgctttctgaaaagaaaaaacaaggcatcctgcctgataacggtgttgttctcaaaacgatcgtcacaagcgaaatcggccgtgctgtagcttcttcattcggccttgatacgattgatacgctgacaggctttaagtttatcggtgaaaagattaaggaatacgaggcatcaggccagtataccttccaattcggttatgaagagagctacggttatttaatcggggattttgcccgcgataaggacgccattcaggctgcgcttttggcagttgaagtttgcgcgttctataaaaaacagggaatgtctttgtatgaggcgctcatcaatctctttaacgagtatggtttttatcgtgaagggctgaaatccctgacgctgaaaggcaaacaaggagcagagcaaattgaagcgattcttgcttccttcagacaaaatccgccgcagaaaatggcggacaaacaggttgtcacagcagaagattacgcagtaagcaaacggacgcttctgactgaaagcaaagaagaagccatcgacttgccaaaatcaaatgtattgaaatacttcctggaagacgggtcttggttctgtcttcgtccttcaggaactgagccgaaggtgaaattttatttcgccgtaaaagggtcatctttggaagacagtgaacagcgtcttgcctccctttctgaagatgtaatgaagacggtggatgaaattgttgagtcaacagcaaaataattcaagtatgagctgggtcattgtaaatgatccggctttttctttttctcatccaaaagtctgaaagaaaatcatcctacaagtgaagcaatgaaatacaaaaaactggtataatcttaaatacaagatcaatgccggagtgagaaacgtgagcaaaacgaggatggaaaaattaaaaacgctgaaaacgattgcggaaaccttaaatcaagggcacgatatcaaagcaacactggatgaggttttaaaagagttgctgagtctgacaaatcttcaatccggatggatttttctgatcgaagaagatggatcttatacgttagcggccgacgctaatctgcccccggctttaagccgcaaggaaaaagtgctgatgtgcgaaggggagtgttactgcctgacgaaattcaataacggagggcttagaaaggctgcaaatatcatgaactgcaaacgcatcgaatcagcagaaaacctgcattgttttgacacagaagggattacgcatcatgcaactgtgcctttagaagacggggacagaagattcggattgttaaatgtagcggcggccggaaaaaccatgtttgatgaggaagagctgcatttactcgagtctgtcgcctttcagatcggaacggcaatccagcgtatgaggctttctgaatatcaacaaaaaaatgctcttttaatggagcgtaaccgcctcgctcaggagcttcacgattcagtcaatcaaatgctgttttccgtcagtttaactgccaaagctgcgaagacactaacaaaagatgagaatttacagcagatgattgaattcatccaaaacctatcacaggacgcgctcgcagaaatgaaagcgttaatttggcagcttcgccccggaggattggaaaaagggctggctgaagccattaaaagctatggtgcactcattggattgaagatcatttttacacaaaaaggctgtcctgttctgactgatgagcatgagcatatgctatggcgtgtcgtacaggaagctttaaataactgcaaaaagcatgccggaacggatacggcgtatgttagtctgactgcttctttgtgccatgcggagctggatatcatcgatcatggggcaggatttcgctatgaagcgcataccggtctgccttcacttggcatcaagggtatgaaagaacgagcggaaaaagccggagctaagttttggattgagtcagcgcttggaactggaacaaagctgtccatcaggcttccgctaacaagccgaaaaggaggggcggtatgaaaattgtcattgctgatgatcatcatgttgtcagaaagggtctgcgttttttctttgccacccaggatgatattgaagttgtcggagaagctgcaactggaatagaagctctccgtgtcatcgaagagacaaagccggatcttgtgctaatggatctgtctatgcccgagatggacggcattcaagccattaaaaaagcaatacagcaatttccggagacgaatatcattgtgctgacgagctactctgatcaggagcacgtcatccccgcgcttcaggcaggcgcgaaggcgtatcaattaaaggatacggagcccgaggaattggtgaaaacactaagacaagtgcatgctggcgaatacaagctttctacagctattatgtcccatgtgctgacacatatgaaaaatcagcacgacccggaaaaagaaaaatactatcaattaacaagaagggaaaaagacgttctgactgaaatagcgaacgggaaaagcaataaagaaatcgcagcatccttgtttatttcagaaaaaacagtaaaaacccatgtatcgaatcttttagcaaaacttgaagtggccgatcgcacgcaagcagcgcttttcgcagtgaaatataacctgaatggagagatcttaaaatgaacatgttagtcataaatggcacgcctagaaaacatggcagaacaagaattgcagcttcctatattgcagctctgtatcacacggatttgattgatctaagcgagtttgtattgccggtttttaacggtgaagcggatcaatctgaactgttgaaggtacaggagcttaagcaacgcgttacgaaagcggatgcgattgtattattatcgcctgaatatcacagcggcatgagcggcgctttaaaaaatgccttggattttctaagcagcgaacaattcaaatataagcccgttgcattattggcagtagcgggaggcggaaaaggcggcatcaatgcgctgaacaatatgagaactgtgatgcggggtgtctacgccaatgtcattccgaagcagctggtgcttgatccggtgcatattgatgttgaaaatgctacagtggctgaaaacattaaggaaagcataaaagagcttgtcgaagaactcagcatgttcgcaaaagcaggaaatcccggcgtttaaacgccgggatttgtttatgtgagaagggctatttgatcttcataagtcagctctgtggcatgatcaatataacggagaagggaatacagcatcttttctaaaacggcgtaatcctgttcaaaatgatatgcatgcagaaaatgctcaattcgttttgataacaaatcgtcctctgtacgcaccattaaaattaataaattatcccattgagaacgatgggtgtaataaagcgctttatcgtaatcggcataatccatgaatcgcttctcctttcttgggtgagaagttcatgattagtttatgccgcatcctctgttattgacggggcaaaacttgccgtctgcgtaagtaaaggggtagcaatatgagggagacataaaatcaaaatgcctgaatgaagatatcgcttttggtaaacctatgagggaacatattctgggtacaggagactgaaaaaatgaaatccctgccgtataccatcgcgcttcttttttgcggattgattatcgtgtcaatggctgcaaaaggtcattcaacggacacagacgagtccgttcaaaagtgggaacagcttgcctggagcaaaattcaggatgaatataagggcgcttcattttctgattatgcttatatggggcgtacagaggtgaatgatcagcagacgaaagatgtctttcgggtgacagtcagacagaaagatgacactttttctgttcgggccgaagtctattttcatccggtgacaaatcatatgatcagcatcaacgtctttaggctctaataaaaaactgtacagccgttaaggccgcacagtttctgtttttagaaatatcgttttgcaccgagatagcgctgtttccagtaagagttgttcatattggaaatgacaactccggaatcgttggcatttatgaattccccgttgcctaggtaaattccgacgtgggaagggccggctttatatgttgtaaagaaaacaaaatctccgacagcaggctggctaactgatttcattgtgttccaatatcccgctgccgttaatctagatacggatgtgactttattcagtacatagtaaatgaatccgctgcagtcaaacccggacggtgtcgtgcctccccagcgatacggaaccccaagctgcgctttagcggccgaaatcattgtgttaatcttcgcactcgttgagctggtgttgtttgaagaaccggatgaagacgatgatgaagcttttccggaaatgaccagcttttggccaacctgcaagacatccgtttttaaattgtttttctcacgaatctgctgagctgttactttaaatttttgagcaatcacccacaaggaatcaccgcttttcactgtgtatgtagtcgtcgtgcctgagcttgcatttgacgaagaagacgacgatgatgaagagcctgaagatgctttacctgtcagcttcaatacttgtccaacgtacagcacatctgatttcagattgttgatatttcggatttgctgtacagacaggttatagttgtttgcgattttccaaagtgaatcaccgcttttaacggtatatttagttgttgctgaagtttggttcgatttggatgaagtgtctttagaagacgtatcagagccgcttgattttgttttcaacacctgattcacgtaaatggtgtctgattttaagttgttcaagaccttcaattcagcgatggacatattgactttgtttgcaattttccagagtgaatctccaagctgcaccttatatgttcccgtagaagatgaggaacttgaactcttattagaactgctttttgaactggagcttgaactcttattggaactgctttttgtactggaacttgaagaaacagtaccggacacctttaatttctgcccagcacgaattaaatcgctgcttagtccgtttaattttttcagttcctgcaccgtcattttaaactcatttgcgatcagccaaagtgaatctccgcttttcactgtgtaaacagaacttccgctcttcttggttgttgagcttgaagtagatgaagaagtgctggatttgctgcctggaatagtaagcgtctggccgatcgacagaacagtagtcgaaagatgattggcggatgtgagggccgccacacttgtgttataggtttgggccagtttccataaagaatctccgcttttgaccttaatcgttgctgcttcagctggtgtcactactaaagttgtgccgacaatcgcagatgctgtcagccctgctgctaatttctttttcatcttagctctcctttttcccccaatgattttgcatttgctgtttcttttttatatcggcacatttgtctcatcgttttgcctttttataaaaatagccaaattatcttaacaataagggggaaaaagggcataaaaaagaaggaatcttgatctattccttcatttttaaaagcttcatgatatcttctttgtttttgacgaggtcgcgcagtgtgtatttgtctaaaactgcgaggtaggccaaaagcgcttcattcagcacatgttttaagccgcaaaccggggaaataacacagagattcttattcgcatcaaaacattcaacaatattaaaatcgtcctccgtttttctgacaacctcaccgatgttgatgtcttcaggttccatgcctaatcgtatgccgccgccccgtccgcgtatcgtttctacgtagccgagctggccgagcctgtatatgactttcatgagatgattttttgaaatagaatacgtttcggcaatctgttttatatttgaaagttctccgggacgctctgcagccagaaaaatcaacactcttaatgaataatctgtataattggttaacttcataataagacctcagaataagacattttctatatcttatcataatcgattgaaaaatgaaaaaaaaggaattaaaaaaacatgcacccagctgggtgcatgttttttgcttacatgtcattcggcggattttggttttttcggtttttttcgatttctgtgttttgcattttgcgttcaaatgtagacagataacgtgatgcaaaatccttaccgccaaggccgaaggataaaccgaaagcgagtgcgaagccgctaagaacgatgatgaacgcggaattgacgattgtcgcagcgacaccaagctgatccagggccataaagaaagcaagtgcgataatcgtatatttagcaataggcgctaaagacttgaattcctggccttttatcatgcttgcgagcacttttctcaccaattctcctgcgtaaaggccgagtccgagaatgaatactgcgacaaggacattcggcagatacgcgatgatgccagtggcaatttctacgaggaagtgcagccgaacaatttgaagagcctcagctgtaaagagcagaatgacaatgatttgcgcaatcataccgacaacttgagacaaggacagctttgcaggcgttccggcttccatgcccattttccctaagacagaatcaaagcctgcgcgatggagcagtccggacaccatggatttcacccattttcctgcccagatacctgctaaaacaagcacgatggcaatcatgatgttcggaagcatgtttaaaatcgtattcagcatagagacagccggttttgaaatgccggagacatccagctgatcaagcgctgaaatgaccaccggaatcataatcagcacataagcgattgttccgatgactgctgaaaggcttgtatcttttaagtaaattgataaacccatacgtgccgcgaatctttccgtgccgatgcttgcaaggaaattcgtaatgatatcacgaacaaggcgggcaacaagccagccgattaatacgataagcgccgctgcaaataatttcggcagaaaagcgagcacgctttccatcatatttgtaaaaggacctgaaatgccgctgattttcaaagaagataagacccctggcagaaaaacaagcagcacgagataaaagacaatttgtgaagcggtattgacagcctggtgaatatcttttccttcagacaccaaattccacttgcgcagtttgtcactcgtgttcagcttcatcccgatttttttgacaaggaagctcaaaacagaggctgcagcccatcctaacagcagaatgagtccggctttcagcacgcttgggatcgcggctgcaatcgccgaaagcatactgacaaacggcgatgccactgttgtcaggtgcaaaatgttaaagaataaaataaagacgatgatcagtgcgataaaataaacgaccttgcttatgactttttccgaggaatagcgtgaaggctttttcccagcaaagagcttgtcgtcaatttttgttttgctgagtcctttgtataccgctttttcaatgattttagcaatagcccatccgattaataagacgagtaaagcaatgattacgtttggcagcttactgagataagaagaaagcacgtctgctacattcaattggtatcgctcctttttcgtagtatggtgtgtgtttacccactgatccaataagaaaacagatgaatgtgccgggggaattttttcttgcccgagtgagactatcatcttttgtctggcgggctcatacattatagataagtccaagtaggggggattcggttgaacgcggaggagaagaagggattacagcgggcaattgaggaaattaccgaaattgcaaaaggattcggccttgatttctacccgatgagatatgaaatctgcccggctgaaattatttatacatttggcgcgtacgggatgccgacaagattcagccactggagcttcggcaagcagtttcacaagatgaagctgcactatgatctagggttaagtaagatctatgagctggtcattaactcagatccatgctatgcttttttgctggacagcaactcactgatccaaaataaattgattgtcgcacacgttcttgcccattgcgatttcttcaaaaacaactgccgtttccaaaacacgaagcgcgatatggtggaaagcatggcggcaacagctgaacggataaaacactatgaacaggttcacgggataaaagaagtcgaatcttttttagatgcgatcctttcgattcaggagcatatcgatccgtcgttggtccgaccaaagctccaatggagtgtggatgatgaggaagaggagattgaagaggcagccacgccttacgatgatctatggtctttggatgaaaagaaaccgaaaaaacaagtgaaaaaatcgaaaaaaccgttcccgccgcggcctgaaaaagatatcctgctttttatcgaggagcattcccgggagctggagccatggcagcgtgatatattaacgatgatgagagaggaaatgctttatttctggcctcagctggaaaccaagattatgaatgagggctgggcttcctattggcaccagcgaattatacgtgagcttgatttaacctctgatgaagcgatcgagttcgccaagctgaatgcaggtgtcgttcagccgtccaaaacaggcattaatccttattatttagggctaaaaatatttgaagacattgaaaagaggtacaacaacccgacggaggaaatgaagaaaatgggcgtgcagcctgactccggccgggagaaaatgtttgaggtcagggagattgaatccgatatctctttcatccgcaattatttaaccaaagaattagtcatgcgcgaggatctttatttgtttcaaaaacagggccgagattataaaatcatcgataaacagtggaagtcggtgcgcgaccagctcgtaagcatgcgggtaaatggcggttttccatatttgacagtaaacgacggcgattatatgaaaaataacgagctctatattaagcattggtatgaaggaatagagttagatttgaaatatttggagaaagtgctcccttatttattccagctttggggaagaagcgtgcacattgagtctgtgcttgaggataaggaagtcatgttttcctacgacggaaaaggtgttcaccgcagatatttataaaaaagaggatgcagcgttctgcatcctttttattttccagtttttaaaatcttaaatatgatgtttgcctggtccgtattgttaatcaatccgcggaatttttcttttccggggccgtacgcgtataccggtacttcttcgccggtatgatcggtactcgtccatccgctgttggagcgagtattaaaaatcttgatgatggctttgtaggcccctttgcttttgtcagcctgtgcagctgcttcaacgcttttgatttcttcagatgtgaatttcagattggcatagcgggcgagcacatctttaaccggcttgccttcactgatttttttggccatgaattcaggtgttttcttagcggagagaatcggttctgcgtgccaattcttttccccgtttgcgccaatggtaaagccgccggttgtatggtcagcagttgcaatcacaagtgtatgtttgtcttttttcgcaaattcaatcgcggctttataggcctgttcaaaatctttaacctcgctcatagctcctactgtatcattgtcatgggccgcccagtcaatctggctcccttcgaccatcaagaaaaatccttttttattttggttcaggcgatcaattgctgaaacagtcatttctttgagagacggtgttttgctgtcacggtcgagcgccttagcaagccctccatctgcgaaaagcccgagcacctgctgatctttatttttcttcaatgcttgtttagttgtcacatagctgtagccggcttgtttgaattcctttgtcaagtttctgtccttgcggttaaaataagattttccgccgccaagcaaaacgtctattttatgtttgccttttattttgtcatccatatagctgttggcgatttcgtccatgtttttccgtgattcattgtgggcgccatatgcggctggagtggcgtggttaatttcagacgtggcgacaagccctgttgacttgccttgctgtttggcctcttcaagtactgatttcacttttttcccgtttttatcgacgccaattgcattgttatatgtcttaacgcctgtcgctaatgctgttccggctgctgctgaatctgtaatattatagtcagggtcatccggatgcgtcatcatcatgcctgtcaggttccggtcaaattctgttaacttcgggttattcggtgtgtcaccgttatttttcatggaacggtaggctcttatgtaaggcgtccccatgccatcgcctatcatcacaatgacatttctgatctcagctttgttttgttttttggcgctggccttttctgtttgctgcagctcagctccggcaaagattccagctgtaaggacagaaacagcggcgattggcagaaattttgatttcatattttgaaacaaattcattttttcatgcctcctttaatgtattccgtttatcacgttagggaaattttgttaaatgcggctgctgatcatgtaaacaataagtaaagccttgtaaggaaaatgaaaaaacgcttttcgttatcttgccttatttgatgtaaagcattcatttttcagaaaaatctttacctctctgtctttgcatgatatgtttgtttaaataaaaaaactgcggataaccgcagctctcctcgaatattctttatcactcatttttccggtatgtgagccgaccccgaaagtttttcatttatttcctttatgttgaaaaacatcccataaaacatgacaaaagcactcgttttttgtcacctttgcaacgaaaatgaaatatttaatacccttaaaaacttttttttagaacgaataattaagaaatttgtcacatgaagtcaagactatttctgatgggaatctatccttataatagaaatcaataagattaattaaaaaaagagatacatatatagagagttaacatttggggaggaaaatatgaaaaagcaaatcattacagctacgacagcagttgttttaggatcgacgttatttgcaggagcggcatctgcacaaagcattaaggtgaaaaaaggcgacacgttatgggatctttcaagaaaatacgacacaacgatcagtaaaattaaatcagagaaccaccttcgttcagacattatttatgtgggacaaactttatcgattaacggcaaatctacaagttcaaaaagcagcagttcttcttcctcttcttctacatacaaagtaaagagcggggacagcctttggaaaatttcaaaaaaatacggcatgacaatcaatgaactgaagaagctgaatggcttaaaatcagatttgcttcgtgttggacaagtcctgaaactgaaaggttcaactagttcaagcagctccagctcatcaaaagtgtcatcgtcttcaacttctacttataaagtgaagagcggagacagtctttctaaaattgcgagcaaatacggcactacggttagcaaattaaaaagcttaaacggcttaaaatcagatgtaatctatgtcaaccaagtattgaaggtgaaaggaacaagcacaagcagctcaaaacctgcttcatcttcatcatcttcaagcagcaaaacgtcatctacatcacttaatgtgagcaaactggtttctgatgcaaaagcgttagtcggaacgccatataaatggggcggaacgacaacttcaggctttgactgcagcggattcatttggtacgtactgaataaacaaacaagtgtgggcagaacaagcactgcaggatactggagttctatgaagagcattgccagcccgtctgttggtgatttcgtcttcttcacaacatataaatccggcccttctcacatggggatttacattggaaacaatagtttcattcatgcaggatctgacggcgtacaaatcagcagcctgaacaacagctactggaagcctcgttacctcggtgcgaaaagattctaatttttagagaaaacccgttcattggaacgggtttttttcattagacggagcacaggcgttttggttgctcctaaaaatgaaaatgtgataaaaaatccaagaattttttttctttcttattttcataaagggcaatcgcgtaagcgccagcatagggcagctgtacagactgataaggaattctgatcatctgtttctctgctaactcacgctttactgtagataaaggcagaaatgaaactccgagtccttccttgataaaccgtttcgttatatgtgtttgagtgaccttcattgttctcacaaatggaaatgtcattctgacttgacggagcaagtcgtcccagtaatcaggatgattatgggtcaaaagcaggtattgttcgagcacctctttggcatcaatttctttgtcttctatgaaacgcttatcgggcggggcaacaaggacgacagggtctttgtataagcagtggcagcttaaagaagaagactgtacctttaaacagcttagtccgatatctgcttccccggctttaatcagtgacgcgatttccgctgattcgaaaatcgtaaccgccatttctgtttccgtattcattgctgtgtaccgtttcatgacagaaggaagcacagtatctgcaataagcggagaaaccgcgagctgtaaggtttgagagtagccttgtctcactctgtgaagctctgccatgctgttttcataatcatcaagaagcctgagcgcatacggcaaatacgccctgccttcatcagtcagctggatttgcctgcctttacgctcgaacagcttgcagctgatttctttttctaattgcttgatatgtacggtcacagtaggctgagataagtaaagcgtttccgccgtttttcggaagttctcatattttgcagcggtcacaaaggtgtgaagccatttgaaatccatttctattctccctctgattaatatttttaattaattccctttaaaatattcattattttttaaatattatatttactataataacagaaaaggatagggggaattcaaatggtacattacggattaaagggaattacatgtgtggaaacatccatcagccatattgatggtgaaaaagggcgtctgatttacagaggacatcatgcaaaagacatcgcactgaatcacagctttgaagaagcggcttatttgattttatttggaaaactgccttcaactgaagaattgcaggtatttaaagataagctggctgcggaacggaatcttccggaacatattgagcgcttgattcaatcactgccaaacaacatggacgatatgtcggtgctgagaacggttgtttcagcattgggggaaaatacgtacacattccatccgaaaacagaggaagcaatccggctgattgctatcacgccttccatcattgcatacagaaaaagatggacgcgcggtgaacaagcaattgcaccttcttcccagtacggacatgtcgaaaactactattatatgctcacaggcgaacagccttcagaggcaaaaaagaaagcgcttgaaacctatatgattctggccatggagcacggcatgaacgcatcgactttttcggcacgagtcacgttatcaacagagagtgatttagtgtcagccgtcacggctgctctcggcacgatgaaaggtccgctgcacggaggcgctccttctgcggtgacaaaaatgcttgaagacattggagaaaaggaacatgctgaagcatatctgaaagaaaaactcgaaaaaggagagcgcttgatgggattcggccacagggtgtacaaaacaaaagacccgcgggcagaagctttgagacagaaagcagaagaggtggccggcaatgaccgtgatcttgatcttgcgctgcatgtagaagcagaagcgattcgtttgctagaaatctacaaaccgggacgaaagctgtacacaaatgttgaattttacgcggctgcagtgatgaaggccatcgattttgacgatgaattgtttactccgaccttttcagcaagccgaatggtagggtggtgcgcccatgtactggaacaggcagaaaacaacatgattttccgcccgtcagcgcaatataccggtgccattcccgaggaaattctttcataacatattttggcgtttattcatttctgtcgtgtggtaacgttcagtatcaaccacatgtctaggagtgatgaatggtgaacccaatggacagacaaacagaaggacaagaaccgcagcatcaggacagacagccgggcattgagtcaaaaatgaatccgctgccgctgtcagaggacgaggattatcgaggaagcggaaaactgaaaggaaaagttgcgatcattactggaggcgacagcggaatagggagagcagcagctattgcctttgctaaagagggggctgatatctccattctatacttagacgagcattcggacgcagaggaaacacgtaaacggatcgaaaaggagaatgtccgctgcctgcttatcccgggagatgttggggacgagaaccattgtgaacaagctgtgcagcaaacagtggaccattttggtaaactcgatatcttagtgaacaacgccgctgaacagcatccccaggacagcattctcaatatttcaacagaacagctggaaaaaacctttcgcacaaatattttttccatgtttcatatgacgaagaaagctttgcctcacctgcaagaggggagtgccattattaatacgacatcgattaccgcttatgaaggggatacggcgttaattgattattccagcacaaagggtgcgattgtttcctttacgcgttccatggcgaagtcgcttgcagataaaggcatcagagtgaatgcggtggcgcccggtccgatttggacaccgcttattccggcgacattccctgaggaaaaagtgaaacagcacggcttggataccccaatgggaagaccgggacagccggttgagcatgcaggcgcctatgttctgctggcgtctgacgaatcttcctatatgacagggcagaccattcatgtgaatggcggccgttttatttcaacgtgatcaacgaaaaaccagctctagagctggtttttttgtgtggtaaaaaatttcaaaataaaaaatttgtcgatttttctaacaattttgttttcatttttgcaattttatatataatattgagtaggagaaaggaatgattcgcgaccagtacaaatatagtagaaaaaaagaaaaatgaccattgttactcatgaattcagaaaattcaaataaaatatataaaaatagatgatcgggagttgaaggggaatgaaagggagcgtttttaggaagaaaagcattcaggatttaatcgctgcgacgagcggggaaaaatctttaaaaagagaattaggggcatttgatttaacgttgcttggaatcggcgccattattggcacagggatttttgttctgacgggaacaggcgcagtcacggcaggtcccgggctgacgatttcatttgttgtggcggcgttggcttgtttattcgccgccctgtcttacgcggaatttgcgtcaagtgtgcctgtttcaggttcggtgtatacattcacttatgcgacattgggagagcttatggcctttattatcgggtgggatttaattttagaatacatgctggcggtaagtgcagtgtcggtcggctggtctggttatttccaatcgtttttatcagggctcggcattcatcttccggttgctttaacagcggcaccgggcgcagtgaaaggcacctttaccctgtttaatcttcctgcattcgtcattgtaatggcgatcacatatttgctttatttaggcatcaaagaatcaaaaagagtcaacaatatcatggttatcttgaagatactggttgttctgctgtttatcgcggtggcagccgtttacgtgaagccgcacaactggcagccgtttatgccaatgggctttggcggcgtattcagtgcagcggcgctcgtattctttgcttttatcggatttgacgctgtatcctctgctgcggaagagacgaaaaatcctgcgaaagatctgcctaaaggcattattttctctttactggtctgcacgattttatatgtcaccgtatcagcgatcatgactggggttattccgtttgctcaatttgcgggtgtggatcatccggtttctctagttcttcaaagcgcaggacaaaactgggtggcaggcatcattgatattggcgccgtgttgggaatgacaacagttatgctcgtgatgctttacgggcagacacgcgtcatgtttgccatgtcgcgtgacggacttgtgccgggttcactttctaaagtgcatccaaagcacaaaacaccttatgtagccacttggtttttcggaacgatgtcggcgcttctcggctcacttgttccgctggatgaacttgcaaagctggtgaacatcgggacgctgtcggcatttgtacttatttctgtggcagttatcgttttgagaaagaaacagccggatcttccgagagcctttaaatgcccgggagttccgtttatcccgggcctggcaattctgttctgcctgttcttgattttaaatctgggatgggtgacgattgtccgcttcctagtgtggctgttaatcggcttggtaatctatttcctgtattcaagaaagcattcaaaattaaatcaataaccttttgataaagagagcggccatacaggccgctctcttttctgttcctggcaaatgaatctatagaaatgaagacaaaaataagagataatataggctggaaaggaagtgacgtttattgtctgagcaaaaaccagtccaatgggcttcgaaaatcggtttcgtcatggcagccgccggctcggctatcggcttgggcgcgatttggaagttcccttacgtagcggggaccaatgggggaggagccttttttcttatcttcgtgttatttaccatcctcttaggctatccgcttttggtgggggaatttatttttggaagacggaaccagacgaatgccattgatgcatataaaaaagaagcgccgcgatcagcttggtttcttacagggtggatcggtgtagccgcgtgtttcttagtgctgtcgttttacagtgtaatcgggggatggattttgctgtatatcgtgaaaacagcgtcaggatcactgtccgggctttctcaagcacagtatggcgctctttttgcttctattatccaaaatccggtgcagacgctcgtggctcagcttgtctttatggtacttactgtcatcgttgtcgcaagaggggttcaaaaagggattgaacgggtaagcgcggtgatgatgccgattttgtttttattgtttattctgctcgttcttcggtctcttacgcttaatggtgcaatggaaggcgtaaagtttctgcttgtgcctcatttcggcgatctgactccggaatccatattattcgcgctgggacaggccttctttacgttaacactgggggtttcggttatggtgacctacagctcctatttgccgaaaacacaaaatatccctcgttcggcagcctccattgtcttgatgaatatcattgtgacactcttggcaggtttggctatttttccggcggttttctcattcggttttcagccaaatgaaggaccgacactgctgtttacagtgcttccggccgtttttgaacagcttccgttcggcacgttgttttttatcggttttctcgttgcatttttatttgcagccttaacctcagcattttcgatggttgaaattatcgttgccacaatcggaaaaggggacgaaaagaagagaaaaaaactgtcatggacgagcgggcttttgatctttttggtcggaatcccatgctgcttgtcttatggcgttttgagtgatgtgcacctatttggcaaaacgttttttgatattgccgattttaccgtcagcaatgttttgatgccttcaggcgctctgttaatttctctatttatcccgctgaaaatttcgaaaagcgaactcttggctgaaatgcgaaatggatcaaatgcaggtaaagcattcttttacacgtggttttatttgcttcgttttatcgtgccgcttgccattattatcgtgttcttaaatttaatcggaattttatcattttaaaaaaacaggctccgtttccggggcctgttttttatttaataagatgatatcaacggtgcccatgccgttttcagtttttggatgccgagcctgatgtcctcttctgacaaaccgccataaccgattaagacagaagcaaaaggcgtctgttctttatatgagggagacacgggatagatggttacaccgtggtctgcggctgcttgtattgcttcttcctcacttgctggaaacaaaaggcgcagcaggatgtgaagccccgagttcttaccgagaatctcaacggtgtttcccagttcagagcggatggcttctaacaggacagcgtgtttttttcggtataagcttctcattctatttatgtgtttttgccactctccggtttcgatgaagtctgccagtgccaattgtgagtgggcagaaacggtctgcttcattaactgagcattgtttttgatcggttccatgagttcatggggcacaatcatgaagctgagccgcaaggaaggcagaagtgactttgaaaaagtgcccagatatatgactctgccattcggatcaagactctgtaaagacggaatgggatggccgctgtagcgaaattctccatcgtaatcatcttctataatgaatgaatttgtttctgccgcccatgccagcagctcctgtctgcgggtaatcgtcataatggtcccaatcggaaactgatgcgaaggagtcgtatacatgagataaggattctgacggtagagctcatccggcaggacgccttctgcatcagaacaaatcggagtgacatccatgtgatttgcttcaaacatccttcttgaacggtgaaagcccggttcttcaaagccgatttttgtacctggctttagcgaaaggcaaagaatttgcagaagcacggtggttcctgcgccgatgataatctggccgggttcacaatttactccccgagacagcctgacgaatcgggcaatcatgtgcctgagttcgtattctccttgagggtcgccagaggtgtgaaacgatccggaatagcgatcaagactttttactatgctttttctccatgcgttaaagggaaagagggtcgggtcaacgctgccctgatggaagtcaatagcaggtgcgttcttttcatgtaatcccggctgtacagactgctgaaaatggtcaggagctgtcgggaatcctggttctacttccgccgcgaaccagccgatttttggcttgcttttgacatagccctcagcagttaattgctcataagctcgttctatagttgccgtgctgacatcgagcaagctggagagcctgcgttttgacggaagtcttgttccctttgtgattcgcgcatgtgaaatttctagtttaaaaaaggtataaagctgctcatacagcggtgttttgctctttttatcaagaaacggcgtgatatccatctcgtgtctcctttttatctggcatggttattttttctgatattggctatttggcaaatgccatttattagctatgatcattgtaacgaaaggaaaggggattgagaagatgatccatatgaaacaattaacctcgaaagaagaatgggctgagtcgtatccgattatgagtgaattgagaacagaactggatatagagacgtatttacaaaggcttgaagcctgtgtgcagaaagaatcgtatatgctgtttgccttatatgaaaatacagcaatcagagcgctgtgcggggctctgccgagagtttccattcataaaggagagcacttgtggattgcggatcttgttacaacggcaccttgccgatcaaagggatacggcaaaatgcttttggattatgcctcagactgggcgagaaaagccggacttggttttgtcagtctttcatctggccttcagcgtaaagacgcacatcgattttatacagataaaatgggttttactatagaaagttatttgttccgaaaaccggtataacgaaaaaagacgcctgaaaaggcgtcttttttaaaagccaaactgtaaattcgtatctacagatacaatggtatacacacaaataatcacaaagagattaaggatgacgccgagcaggccggggcctgtgcgccctctcttgatgaagagttcaacaacgccgaacggaacggcagccatggcgaatggaagcatttgataggaataaaacgtgacattgctgataatggccaaattcagcaacagcagggacagaaccgctgtcccgacagagatccagccgaatacattgtgttctttaaaaattcttaccagttccataattccacctcgccgacattcgctgattttacagatttatttttcagcatgcgctggatttccttggttggccctgtaacgaccgaaccgtatacattgacaccgtttttctctacataatctaatcggttatctacattcaggtctttccgttttgaaatgacctgagcccatttttcgtgtttggacatgaattttagggcgttgataaactgatcgccattcgacttgccttttgtattaagggcggccaagaactttgaatcctttccaggatagccaagaggttctgtggaagctgtcttatttgtgtttttctctgtttcgattgcgttccacaaaaagctcacatcatagcctttgaatttgttatacacgtcttttgtcggatatgcacggtcatatgaaaggtagacctctgataccgttccttcaggcaatgtgcttaacgttttttctgcttttgcggtcgtttgttcagacttgtttgaaggatgtgtaaagtaatgtccggttttattcacttctaagtcatagtagtttactgccggcgcttttactttgttataaaacatttcaacccgttcattccctacggcagccgtcttcgtgccaatctgcttttgcagcgggaattccgtattcattccaaatagcttcacttggcttttcagtccggaagtatcaacaagaacattcggcatggtcagggctacagtgactgcggcagtttccataaactcattgccggtgctgtgtttcccacccattccgtaatagaggtagcttcccagcgtacaaagcggcaaaatcatcaatgtcgaaatgacggcaagcacagaaattcgcaaataagacttgcgtttgccgtaggctaaaatcgctttttgtttttcaggactgatgctgagatcccaatcgttatcgtcctctagttcgctgtcaatcagttcctgatatacttcgagcttctcaagttcttcctcaaatgcagtcatttcctggtcgctcatttccccatttttatattgatcaaaacgctttttaaattcttcattcatcattaacacctctattataaagtgctttcagccgctgtctggcacgaaataaaacacttttaaaattcgcctctgaaatattcataatatgggatgcttctttgtagtttaactcttttaaataatatagcgttaaggcctcccgataattatcggggagctcggacatataaccagtcagcacttcctttatctctacctgatgggcaggactttgaacagcattttgaaagaggcttccgattaagtcatcagaaatggttacttctttcttatgctttctgacgtaatcaatgaaggcgtttcgcgccacttgaaaaagccagggctttactttgctgtgatcataggagtgaatgtgtatgtatgcccgcataaaggtttcctgcagtaagtcttcagcaagatgcttgtcttttgtcatggagagcaggaacctgtaaacatcattcatgtacatttggtaaatttcatcgatcgtcactgccttttctcccctctatgttatacacgcataagaaaggtttaaagttgcacattacatgcaaacggcttttttatacctaatcaaacaccattactatatagtacccaaaaatggccgcaaaagatagtgcggagaaaggtttaacattttttccagaggggaaaagatagtgaaaaagtgaaggagtggcacaatggaatataccagtatagcagatacaggaatagaagcctccagaatcggcctcggcacatgggccattggcggaacgatgtggggaggcactgatgaaaaaacatcaattgaaacaatccgcgccgctcttgatcaggggattacactgattgacaccgcgccggcttacggcttcgggcagtccgaggaaatcgtcggaaaggcaatcaaagagtacggcaaaagagaccaggtgattctcgcaacgaaaacggctctggactggaagaacaaccagctgttccgccatgcgaacagagcgagaattgtagaggaagttgagaattctttgaagcggcttcaaacagactatattgatctttatcaggtgcattggcccgatccgcttgtgccaattgaagaaacggctgaagtcatgaaggaattatatgatgcgggaaaaatccgggcgattggcgtcagcaatttttcaattgagcaaatggatacatttcgcgccgtcgcacctctccatacgattcagcctccatataatctgtttgaaagagagatggaagagagtgttcttccttatgcgaaagataacaagataacaacattattatacggcagtttatgcagagggctgttaacaggcaaaatgaccgaagaatatacatttgagggcgatgatctgcgtaatcacgatccgaaattccagaagccccgctttaaagagtatctttctgctgtcaatcaattggataagctggcgaagacacgttatggaaaatcagtgattcacttggctgtcagatggatcttagatcagccgggagcggatatcgctctttggggagcaagaaagcctgggcagcttgaggccctatctgagattacaggctggacgctgaacagtgaagatcagaaagatatcaatactatattggaaaatacgatatcagaccctgtcggaccggagtttatggccccgccgaccagagaggaaatataacaaaagctgagggcgaatcctcagctttttggcgttttaacgggagaaatcttaaaaattagtaccaggtaataaaaaatgttgttataatagaagatagaaagaatcattgattacgacaaaggaagtgcgatatgtataagttttgtgcaaatgctttaaaagttattctttctcttcgcggaggagtgaaggtgtataacaaagaaaaccttccggccgattcaggttttgtcatcgcgtgtacacattccggctgggttgatgtgattacactcggagtcgggattcttccttatcaaatacactacatggcgaaaaaagagctttttcaaaataaatggatcggttcgtttctgaagaaaattcatgcctttccggtagatcgggaaaatcccgggccaagcagtattaaaacgccgattaagctgctgaaagaaggagagatcgtcggtatcttcccaagcggaacaagaacctctgaggatgtgcctttgaaaagaggtgcggtgacgattgcgcaaatggggaaagcgccgcttgtccccgctgcatatcagggcccttcaagcggaaaagaattattcaaaaaaggaaaaatgaagctgattatcggtgagcctcttcaccaggctgattttgcccacctgccttcaaaggaaagacttgcagcaatgacagaggctttgaatcagcggattaaagaactagagaataaacttgatcagctataaggcgttctgagagattgccctgaaactgtgaaaataagaaaagcaccttatacaaggtgcttttcttattatgcttcctgctggttagctgtctccagaagttcttcttcttgaagctttttcacttcaatatatgcgacgtggtggccgtcaatttcattaatgatgaattcgcagccctcttcgatgatggaatcatctttttcaacatcgtatttttgagtaaggaaccagccgccgattgtatcgacttcttcgttctctaaatgaatgcctagcaggtcgtttacttggtcaattaacacttttccgtcaagaatataatggccttcgccgattttgcggatttcgctaatttcatcaatatcaaattcgtcgcggatttcaccgacaatttcctcaatgatgtcctcaaccgtcacaagcccggcagtaccgccgtattcatcagacaatatggccatgtggaccctctctttttgcattttgacaagcaggtcttggattggcgcagattcaatgacatgaatgatcgggttgacgaattgagaaatggtggaatcaacagatacctcaccgctgatgcaggcggtcagcacttctttaatgttaataaccccgataatgttatctttatcgccctcttccacagggtagcgggtatatttttcaatctgaatgatgtccatcatttcagaaatcttgatatcatgcggaaggctgacaatttcagtccgcggaatcataatttctttcgcgagcctgtcgtcaaattcaaagattttattcacatatttaaactctgattggttgatttcaccgcttttatagctttcagacaaaatgattcgcagctcttcttctgagtgtgccagttcgttttctgaaacggtctccaggccaaatgctttggtcaataaccgtgcggaattgttcaaaagccaaatgaatgggaacgcgatgcggtaaaaccaaatcagcggtttcgcaaacagcatagacactgcttccgccttttggatagcgactgttttaggtgcaagttctccgacaacaacgtgtaagaacgtgataatggcatacgcaaaaataaacgatatgacatgtgaaagggaacctggaacattcatttggacgaaaagcgggtgaagcagcctttcgatcgttgattcacctaaaacccctaatccgatggaagtcaatgtaattccgagctgacacgcagataaatattcatcaagatgcgtggtcactttttttacggctattgctgctttatttccttccgcgatcagctgatcgatccgtgagcctctgattctgataatggcaaactcagatgccacgaaaaatgccgtcagggcgattaaaacagcaactaaaatcaaattcactatgtccaattagaaccttcactctagcaatgagaatgaaggtaacacctcctgttagataaaatggttttaacttaacagcagcataaatgattggaacacggcgagcttttcaggcgggagtttgcttttcagcttgtcacgatcctcgggcttcagccgttcaaaccgatgcaagattccggagatgttttgattcatatgatcaatttctaatgccagatttccaatttcatcatcaagtttagctgaagagggaaactggttctccagtcgatctttaatatcggacagggccaatcgctgcttcttgcaatctacaataaatataagtcttttgagtgcattttcgtcgtagtaacggtaatttgaacaggatctggccggcgtaagcagaccaagattcgtataataatcaactgtccgtttcgttactccggcgagtgccgctagttcactgatgcgataagtctcagccccatctatatccctcccaaccatcacgttatagttatgagaatagtttaatatatgaatggtgtcttgcacaagtttattgttttttttagaccggaattggaagttgtggaattcatcatctgattgaagtaacataggaagatagaattttcaaacttttatatacggaagggacagatgaaattggctgggttatcccgggaagttgaagaaaacttaaataaaggatcatggattcgcaagctgtttgatgaaggtgcaaggctgaagaaggagttcggggaagaccaggtatttgatttttcactcggcaacccgattattgaaccgcctgaagcttttaagagagcgttaatagaggaagctgaaaaaggcagccacggatacatacaaaaccaagggcttcctgcagcgagagaaaaagtcgcgcaatttttggggtcgcgttttgaagctgatttctcagcggagcgtatcgtcatgacggtgggcgcggggggcgctttgaatgttgcgttaaaaagcatcgtaaaccctggggaagaggtcattattctcgcaccttattttgccgaatataagttgtatattgagaactacgggggaaaagccgtcagctgcccgttgacaagccggtttgagatcgacattgaagcggtaaggcaatcgatcactccacagacgaaagggctgatcctcaatacaccgcataaccccacaggcactgttctcagccagaaaaatatagacgatttaggcgctttattaaaagaaatagaagagaagagcggccagacgatttatgtgctgtttgatgaaccgtacagtcaattaatctatgatgaagagctggcaaatccgtttcaatcgtaccatcgtgtgatattggccagctcattcagtaaagatctcggcatagccggggagcggctcgggtatatcggattggacagccgaatgccggatgcggaccttttgatcaacgcttttgtgtattgtaatcgaacgcttggatttgtgaatgcccctgtcatgatgcagcgggctgtggcacgaatggatgatttaagagtagacgcgagtgtttataaagagcgccgggatttaatggtagacattttaaaagaagccggttttgaatttgaaatgccaaagggaggtttctttgtttttccaaaatcgccgattgaagatgaagttgcattttgcgtgcatgccgcccaaaaatacaaattattaattgtgccgagcagcggttttggaatgagcgggcattttcgattatccttcagtgtgccgatcgagcagattaaaaactcacgggacattttcatttctttatataaagattttgcttaagaaggcaaagaaaagaaaacagttttcaaggctgttttctttttatatccacaaaatccttcctcttccaatccagacaggcgaagaattgacaagcaggcatgcagttaagtctttcttcatgataaaagtctaaaaattaaaaatcatttttggaatgagttgtgttacaataaaatatacaatttataatcaaactttgacttttggaggtggtaagatggggccctctgcttaggcaacaatacaccgcgtacctcaatgttaaggaaaaatgattatatcaggaggtgactccttatcctttgttgagaggatagggttaaatggacgatattgacagtctgattttaattggcgtgctcattgctttaaccgcgtttttcgttgcaagcgagtttgcgattgttagagtaaggagatccagaatagatcagcttatcacagaaggaaacaaacgggcgatactcgcaaggcgtgtcattacagatttggatgaatatttatccgcatcccagctaggcattacattgacatcaatcgggcttggcgtactgggtgagccggcctttgaacggctgctgcatccactgtttgaaccgctcggcttgccggactcggtttcacatgcagtctcttttgcagtcgcgtacggcttgatcacgttcctgcacgttgttgtaggtgaacttgccccgaaaacggtcgcgattcaaaaggcagaacagctgactttactgatagcgggccctttgcgtttattctatttgctcctgtttccgtttatttggatcctcaatggatcggcgcggcttttatgcgggatgttcggtttgaagcctgcgtcagaacatgatggttcccattctgaggaagaactcaggatgctgttatctgagagtttaaaaaacggagagattaatccgtctgaatataaatatgtgaataagatttttgaatttgataatcggatcgccaaagaaattatgataccgcggaaggaaatggctgctgtgtcaactgagatgacgatggccgagatgcttgaagtcatgctgaaggaaaaatacacgcgctggccagtcacagatggagacaaagacagtgtgatcggtttggtcaatacgaagcatttgttttctgatttgctgtttatgacagaagaagaacgaatgaagatgacgatccatccgtatgtgaggccggtcatcgaagtgattgaaacgatcccggttcatgatttgctgattaaaatgcagcgcgagcgcattcatatggcaatattgtcggatgaatacggaggaacctcgggacttgtgacgacagaggatattcttgaggaaattgtcggagagatcagagatgaatttgatgaagatgaacagccgctgatccaaaagcttggcgacggccattatgtgatggatggaaaggttcggatcgatcaggtgaacagccttcttggcgcatcgattcaagaagacgtcgatacgatcggcgggctgatattaaaagaaaacatcgatattgaggctggtgaatccattcgcatcggttcatattcgataaaggtgctgaagatggacggccgattaatcaagcaaatcgatataaaagaagaagccggcaacacaaccgggattacggcgcaccacaagctgctgctgcccgatcctgtgatgctgaacagtgcaaccttgagcgagaaataagctcaaggtttttttacattgtgattgtccagccgcaccaaaatgccaaaagcgatccgcaaagtgtcagggcgatgtacaagatgctttctattacacgtttggccataaggagttgaatagtttcaacgctgaaggtggaaaaggtcgtaaaggcgccaaaaaaccccgtgccgatgataagcgagaccgaagcatttgcaacgtgaagtcctgtaaatattccgagcccgagagctccgagaatattgactgtcagtatgccaatgggcaggctgagacctttggttttggcggttatgacattgccaagccagaagcgaagcattgcgccaagtccgccccctatgaaaatacccgctagtgtcatctttcctgcagcccctttctttgctgaatgcctgctatgcgccgtcccgcaaaaacaccaatcagtgcaaatatgatccctgatatcaatgaggctgccacatataaaagagccaatgagggttgtccttgcaaaagcatcactgtttccttagaaaacgtggacattgttgtgaagcctccgcaaaagccggtgcctaaaaaagccgacagcagaggccgttttgccccgatcagaaaaaatccggtcaaaatgcctaatagaaggctgcctgccgcattttccagccaggttgccgccgggaactgaccggtgtgtatccataagtttaatccgtatcggaggcaggcgccaagcgcgcctccgataaaaaccgcgctatatattttcatgtttgccatcctttatgatgaaatccgggtaatctgtaacgatgccgtccacgcccatggcttgtaattttgccgctgtcttttgattgttgacagtccatgcaaatatgtttaagccatttttatggatggagccgatcatcagacggttaagccgtgtgtgttttatattgacatagtttgcaaaagagcggaaggccttcatctgatttctggacagcatgccaaagttgggccttgtaatgaccgctgtcggaatcgaaggataaagctcgcggaacctttggacggagcggaactgaaaggattgaacaatattattgatagaaaaagaaaattgccctaatagctgtcccacctcttcttcaattccgacttgagacggatggccttttagttcaattaaaaggccgatttttttgtggtagcgcttgagcaccgcttccagggttggaatacgctctccttgaaaagcgggaccgtaccagcttcctgcatcgagtttttgcaattcctccaaggtaaaatccttaacaaagcccgatccgtttgttgttcggtcaaccctgtcatcgtgtatcacaacaatctgcctgtcttttgtaagctggacatccagttcgatcatatctgcattcattttcaccgcaaggtcaaatgcggcaatcgtattttccggagcgtagccggatgctccgcgatgggcaatgatgtacaagctaagtcagctcctcgtatgggcatttctgttattgtatcaaatccatatatgcaccgcgatacaaactggtgaattttttctgccatatcggaatggtccgggctgaggaatgcgtataactaaaaaaagacactcagcgtatcagaacacatttcgtcagaaaattaggtctttcgacatgttcacaacaaaatatgatcctttataatagcaaaaaaggaggcgagatcatgggaaaagggagaatcagagtggaggaaagaattaaagccgaaacggatgctgaaatgcaaaaagcaactctccttgatcagacacaaacgaaaaaaggtaagtgactgtccctattgaatctggctgatagatgaattgagaaatgaccccggcgtttcgccggggttttgtgctgcaaaagacatttaaatgaacatccttacgaatattttagtataataaacaattgattgggatagaggggagacagtcatgccggattatctgcagcagtattttacgcttgataacatcatacaaatcggcatcagcttggcgattttgctggtgtttcttatacttagaaaattattcacaagatatttctttaacctgctttttaatttgacaaaccggccgaaaacagaaatttttaaacaggtggttctggcgtttgataagccggccagatggttttttgttgcccttgggctgtttttagcgatccggtattcaccgtttttagatgagcaaatgccggtcatcagcaaaatataccgctcactgattgtggcgcttttgtgctggggtctttgtaatttgaccgcaacatcgtcgtttatcttccataaggtgaatcagcgcttcgagcttgacatggatgacattctggccccgtttttatccaaattgctccgttttgtgatcattgcgctcagtgtcagtgtgatcgctcaggaattcaattatgatgtaaacggatttgtagcgggccttggtcttggcggactggcttttgcgcttgccgcgaaggataccatcagcaacttcttcggcggtattatcattattactgaaaagccgtttacaattggtgactgggtggagacgtcgacagtaacaggatcagtcgaggatattacctttaggagcacgagattcagaacagcacagggggcgcttgtaacggtgccgaactctacgctgtcgatggaagcgatcacgaactggacaagaatgaccaaacgccagattacgttttccatccatgtgtcctacgctacgccgattgagaaccttgaacgctccattcattctctcagaacaatgctcttagagcatgagggcgttgataatgaaacaatcatggtcaactttgatacgtttgccgacagctactacaatttattttttaacttctatacaaaaacgacggtttgggctgaaaaccttaatattagagaggatatcaactataaaattattgagattttaggtgcagaaggtgtccagtttgcatatcccggccaaatggttgttgtcaagcaaaagcacgaaagtgacccattccaggtgaatctaaataaagaggaaaaggaacgggcttaaaagagagacttcgtctgacagaggcggagtctttttcatggtaaaataagagaaaaaggcggtgttgagttggaaacattcaaaagtattctacatgaagcacagcgaattgttgtgctgaccggagcgggaatgagcacagaatcagggattcccgactttcgttcagcagggggcatttgggcggaagatgcctcaagaatggaagcgatgagccttgattattttttaagtcatccgcgtctgttttggcccaaattcaaagaattgttccagatgaaaatgagcggcagctttgaaccgaatgaaggacacttgcttttagctgagctggagaagcaagggaagcaggtcgatattttcacgcaaaacattgacggtcttcataaaaaagcggggagcaggcatgtatacgaactgcatggttctatccagacagcagcttgtccggcatgcggcgcccgatatgatcttccccatttgctggagcgggaggtgccggagtgcacggcggccggaaacaatggggacatttgcggaacggtattaaaaaccgatgttgttctctttggcgacgccgtcatgcactttgacaccctttatgaaaagctggatcaagcagatcttttattggttatcggcacgtctctcgaagtggctccggctagatttgtgcctgaggatgcaagtctgattcccggcatgaagaaagtcatcataaaccttgaaccaacgtattgcgacagcttgtttgacatggtcatccatcaaaaaatcggtgagtttgcccgaagtttgggcataaaaaagtgagccgccttatgcgcctcacttttttattcatgaacaggaaccattgtgtcctctaacactccgaaggaatagcctttttcttttaatttattgattagtaccggcagcgcgtttacggtagcgggaagatcatgcatgagaatcacattcgggcggcctgaagagctgtgttccatattttcaagctgctctaacacggccgtcacatactgtgaatttcggtatttccagtccatgctgtcaatcgtccaatcccagtacacaaaaccgtctttctcaagattgcggatttgtgagggggttagtgacggtttgcttccgtagggcgttctgacaagagcggttttatatcctgtaatgtcctgcagtgtgtcacgcgcctcctgcatttcttttagcggagatgtcggtgtttgatagaacaatctgttattgtgggtaacgccatgtaaaccgagtgcgtggccttccttttctgctcttttcacagcctgcttgaattcgttcatccgcggtgacagcataaaaaacgtcgcttttacatcagcgcttttcagtacatcgagcaagcgggttgtaacggctgaagggccgtcgtcgaaggttaagtaaaccgttttatctcccatgttctgctttgtctgcagatgttttatcagcagatcgggggagtcgtttttcagcttaaggctttctttctcatctcgaagctggccgtttgttgtgacagtgacttcctttgctttcgttgaactgttggaataacccaaaatcaccataagcaaaagcagcacacataaaactgctaaacttgcaaatttaaaagcaagcgaaactgcagaaggagaagcctctcctctcgtttgtcgcataacaatctctccattggcataaaatctctacataatgctgtacagcaggcagcttatgaagatgccttatgtttacaacctatgtattaccagtcaagtatacaggaataaaactggaaagcacatagaaaatttgtcgaaatgtcagattttaaggaaaaaataaactcctttccgctatagatctcttgatctttctgtttttcggcttgtccaatatggtagaattagtgataatgacagcttgaatgacatcagggacatctcgaaaagggagggcttttatgaaggttttagtcaatggccggctgattgggcgcagtgaagcatcaatcgatttggaagatcgcggttatcagtttggtgacggcatctatgaagtgatcagggtgtacaaaggagtattgttcggcttacgtgagcatgcagagcgttttttcagaagtgctgctgaaatcggaatttcactgccattcagtatagaagatctcgagtgggacctgcaaaagcttgtacaggaaaatgcggtcagtgagggtgcggtatacattcagacaacaagaggtgtggccccgcgaaaacaccagtatgaagccggcctcgagccgcagactactgcttatacgtttacggtgaaaaaaccggagcaagagcaggcatacggagtggcggccattacagatgaggatcttcgctggttaagatgtgatatcaaaagtctgaatttactgtataatgtcatgacgaagcaaagggcctatgaagcgggagcatttgaagccattttacttagggacggcgttgttacggagggtacatcctctaacgtttatgcggttatcaacggcacggtgcgaacacatccggctaatcggctcattctcaatggaattacacggatgaatattttaggactgattgagaagaatgggatcaaactggatgagactcctgtcagtgaagaagagttgaaacaggcggaagagatctttatttcgtcaacgacggcagaaattattccggttgtgacgctcgatggacaatcggtcggaagcgggaaaccgggaccggtgaccaaacagcttcaggctgcttttcaagaaagcattcaacaggctgctagcatttcataaatgaacgaagaaaagagcccgctttatacagcggagctctttttattttttaacaaatccaatcaaaatggagatcatcggcgatatatagaggaagaacgtaaacgggatgtagtctatgactggaacaccaagtgcgctcgccataaatgcgccgctgacgccccaaggaatcaatgggttaattaatgttccgccgtcctctaatgaccttgtcagaaatttgcgctggatgttttgtttgtcatataaggatttaaatgattgtcctggtattaatatcgataaatactgttcaccggttgccaagttgacgccgatgcttgagcagacagttgctgcaactagacggccttttgagcggatgcctttcatgatgccttccaatagtgcagaaatcaatccgattttctccatcaatccgccgagtgcaaaagcaatcataatgagagagacagagcccatcatggattgcaatccgcctctgttgataattttagcggctgcctcattgtcagtttcgaaagttgtgccattttgcaaagctgtcataaacgcctgcaggctgctgtcgggtacaaaaatagcagtcaaaattcccgaggaaataattccggcagtcagaacggggattactgatacccgtttcattgccagcaaaacgactaagagcggagaaagaagggcccacggtgtcacgtttgcaacatcttttattccggttatgacctgctgaatattatcggttgaagcagcgtccgctgacactgatgaaccgagaaagtaaaacagaacgacagtgatgagcaaagctggaatggttgtgcccatcatatggcgaatgtgttcaaagatcggtatttcgcctattccggctgcaaagttggttgtgtccgacatcggcgacattttatccccaaaacaagcgccgcatatgactgcgcctgctgtccattcaagcggaacgccggccgcgctcgctacgccgatcagcgctaccccgattgtgcttacagttgtcaggcttgagccaacaagtgtgctgatgatcatacatgaaaacaaagcagtcaacagaaggtggcttggttcaataaaggatagggcataaactgtcacagtcggtattgcgccgctgtacatccaggcgccgattaagatgccgatcagcgctagaacaataatcggctgtacgccgtttttgatcccgtctacaatccctttttcaatactcttccaggaaaatccaaaccataaagctgctgctgaaagcatgacaacacttaaaaacagcgggatatgaggttctacatgaagcaagaataagcaagaaataataatgcataacatgaatataaataaaccgacggctaacggaaacgtcagctttttttgagaatccaaaataacaccccatatttatctttaatgcttttgtgcttttgggcacgaaagcattataacagaaaaaaacgaaaatctatgttttttcacaattatgaatataaaagaagtgagcacagggcgtgctcactttacaatcaggacgggtatatccgatttcgctgaaagcttttcacttacacttccgaatattagctttttcagcctgttttggtctctgcttccggttacgatcatatcggcagaaatgcggtttgcatgctcgataattgattcagccggatcgccttctaatatatcgatatctccatctgcctgctgttcattcagcatcattcttgcttcggcgatgacttcttccgtacggtcttcatagatcattggctcaggtgatgttacacccgatatcagcggatcaggaacacttgtcatgcctccgctgatatagcttgcctcagctgcgggtctgggtgggtcgatgacggtctgattgtctttcatatcatgtgaatgggcgacggtaatagcggcatttaaggttttagcaagatcaatggctgtctgaagcgctttcttactattttcacttccgtcaaacgcaacaatgatacggtcagcatggaacatccttctcaccctttcaaagcgtcttacaacactactacccgaatttgagcacaattaaccttttcctattcaagtaatgattgacaataaaaggttttgtttatatgatgataaaaagatgaaatcagaatggaaggagggtttgctatgccaaggaatttgcgtgtttatcaaacagtttcatattggcgcggcaaaccttttgttctgttttcgtgaacggttttttaggtcggaccgcgcgctgaaaagcgctgtgcgtaacatatcggttaaaaaaggcatggagctgacgcttcatgccttttttatatacaaaatctaaggaaagacaggtgtatgggatgtgaagacaaatacagaggcgagggctgttcatgccaaactggatgaaaaaagctgcaaggaaaaaatagaaggcggctgataaggagatggggatagatgttttcagttttgaaaaagcttggctggttttttaaggcgtactggctgcgctatacgattgcgattgtccttttattagcagtcaatgtcattgaaatgtttccgcctaagctcttggggaacgccatagatgatatgaaaacaggggcatttactgcggaagggctgctgttttatatcggtatcttttttgtgctgacggcggccgtgtatatcatgtcttatttttggatgcatcagctgtttggcggagcgaatctgatggagaaaattcttcgtacgaagctgatggggcatttgctgactatgtcgccgccgttttatgaaaaaaaccgaacaggcgatttaatggcacgagggacaaatgatcttcaggccgtcagtttaacgacaggatttggcatcttgacgttagtcgattctacgatgtttatgatgacgatctttttgacaatggggtttttgatcagctggaagctgacctttgccgccattatcccgcttccagtcatggcgattgcaatcagtctatatggaagtaaaattcatgagcggtttactgaggcccaaaacgcgttcggggcgctgaatgacagagtgctggaatctgtttcaggcgtgcgggtgattcgcgcgtatgttcaggaaacaaacgatgttcgccggtttaatgaaatgaccgctgatgtttatcagaaaaatatgaaagtggcttttattgattcactgtttgagccgacggtgaaactgcttgtcggcgcaagctatctgattgggctcggctacggagcgtttcttgtattccggaacgagctgacgcttggagagttagtgtcctttaacgtttatctcggcatgatgatttggccgatgtttgcaatcggtgaactcattaacgtgatgcagcgcggcaatgcgtcattagaccgggtaaatgaaactctttcttatgaatcggatgtgacagatccaaaacagcccgctgatcttaaagagcctggagatatcgttttcagtcatgtcagctttacatatccaagctcaacaagtgacaatcttcaggatatttcatttacggtgcgaaaagggcagactgtcgggattgcaggtaaaaccgggagcggaaaaacgacaattattaagcagcttttgcgccagtatcctccaggtgaagggagcattacattttcaggcgtaccgattcagcaaatccctcttgaccgtctccgcggatggatcggatatgtgccgcaggatcatttactgttttcacggactgtaaaagaaaatattttatacggaaaacaggatgcaactgataaagaggttcagcaagccattgccgaagcacattttgaaaaagatttgcacatgcttccgtccggtctggagacaatggtcggtgaaaaaggcgtggcactgtcaggcgggcagaaacaaagaatttcgattgcgagagcactcatggcgaatccggaaatcttgatcctggatgattcgctttccgctgtagatgccaaaacagaggctgcaattatcaagaacatcagagaaaaccgcaaaggaaaaacgacatttattttgacgcaccgattatccgcggtagagcacgctgacctgatccttgtgatggacggcggcgtcattgctgagagtggcacgcatcaagaactgctggccaataatgggtggtaccgggaacaatatgaaagacagcagctgttcactgcggaagaagggggagcaggggcatgaaaataggaaaaacgttatggagatatgcacttctttatcgaaaattgctgatcacagccgtccttttgctagctgttgccgtcggtgcagaactgactgggccctttattggcaaaaaaatgatagacgaccatatcctcggcattgagaaaacatggtatgaagctgcggaaaaagataaaaatgccgttcagtttcacggcgtctcatatgtcagagaggaccgattgcaggagcctgtttcaaaagcaaaagaagcgcatatttatcaagtgggaatggcattctattttgttaatcaggctgtcagcttcgacgggaatagaacggtttctgacgggaagctgacgatcacaaacggagacaagagccgggcatatgctgccgaaaagctgactaagcaggaacttttccagttctatcagccggaaataaagggaatggtgtttctgatctgcctgtatgggggcttgcttgtgttttcggtattctttcaatacggacagcattatctgctgcagatgagcgccaatcggattattcaaaagatgaggcaggacgtgttttcgcacatacagaaaatgccgattcgctattttgacaaccttccggccggaaaagtcgttgcgcggattaccaatgatacggaggctatcagggatttatatgtcacagtgctttcaacatttgtaacaagcggaatctatatgttcgggatattcacggctttgtttctgcttgatgtgaagcttgcgtttgtatgtctggcaattgtgccgattatctggctgtggtcagtcatataccggagatatgcgtcatattacaaccaaaaaatccgctcgatcaacagtgacattaacgcaaaaatgaatgagtcaattcaaggcatgaccattattcaggctttccgccatcaaaaggaaacaatgagagaatttgaggaattaaatgaatcacatttttatttccaaaacaggatgctgaatttaaactccttaatgtcccataatttggtcaatgtcatccgcaatcttgcgttcgtctgtctgatctggcattttggcggtgcgagcctgaatgcggcggggattgtttctatcggtgtgctgtacgcgtttgtcgattatttgaaccggttatttcagccgatcacaggcatcgtcaatcagttttcaaagctggagcttgcaagggtctccgccgggcgtgtttttgaactgcttgaagaaaagaatacggaagaagcgggtgaaccggcgaaggagcgcgcgctggggcgggttgaatttcgtgatgtgtcatttgcgtatcaagaaggtgaagaggtattaaagcatatttcctttactgcgcaaaaaggcgaaaccgtagcgctcgtcggccataccggatcaggaaaaagctcgattttgaatcttctgtttcgtttttatgatgcgcaaaaaggtgatgtcttaattgatggaaaaagcatttacaacatgtcaagacaggaactcagatcccatatgggtattgtgcttcaggacccgtacttattctcgggcacaatcggatctaacgtaagtctggatgacgaaagaatgactgaagaagaaataaaaaatgcactgcggcaagtcggtgctgagcctcttcttaagaagcttccgaagggcattaatgagcccgtgattgaaaaaggcagcacgctatcctctggagagcggcagttaatttctttcgctagagctttggcgtttgatcccgcgatcttgattttagatgaggcaacggcgcatattgatacagagacagaggccgtgatccagaaggcgcttgatgtcgtcaaacaaggacgcaccaccttcgtcatcgctcaccggctttcaacaatcagaaatgctgatcagattttggttcttgataaaggagaaattgttgagagagggaaccacgaggaactgatggcattagaaggccaatattatcaaatgtatgaactgcaaaagggacagaaacattccattgcataacgctcaaaaacccaaaacaatcgtgttttgggtttttggtttatgtagtcaataagccagtccgacacggtttccgacatactcacctgtaacgagctcacgatataaaaagtccgcagtatcgccgaccgaaatgcttgtgccgccctcaggcaaaacgttacgctccgtacgataaacgccggttgctgttccgtccgggaggtaagtggggcagatgattgtccagtctaatgatgattctttaagcatttcgtatacttttgcatgctccttggctgcgcgggtctgctttcgtttcgattcatttgtttcaaaccggtattttcccggttcatatcgggaatctaggatccctgcggtgccgatcgtaataagccgtttgatatgctgttcctccataacggagagaatgtgtgccatagcagttgacaaggtatcatcaccatctgtgcctagacagctgatcacgatttcagcattctccattatttttttcacatcttctaagcggcgggcgttccccatgacggttctgtcttttgaaaggggaagatcagcatgttgagatctgatcagagcgaaaatatcaaatctttcatctgctgcagcttgtgttaaaaaggcttgtccgacgcggccgctggctcctaataaagcgattttcattaaaaaacctcctcgcctttcattataaaaggatgttctcagtttgaacagcgcgggaaagaatacctgtacaaataaacagaacgatgggaaacatattcatgaatcatggatacacttacgaattgaaccagctcccaattcacaatggtgatgaatgacaccccgattccctccctttttttctaggatatgtggagcaggaaaaaagggtgacaaaataaagagagcgcggaaaccgcgccctctatagccatatattgaattgttattgaactctgccgcccatttgctgctgagcgaaagatactaaacgttttgtgatttctcctccgacagaaccgttagcgcgagaagttgtgtccgctccaaggttaacgccgaattcagaagcgatttcaagtttcatttgatcgatagcctgagctgcgccaggaactagtaagtcatttgaagagttttggttagccatgtgtaaaatctcctttttatttagtatggttgggttaactggagttgcaccaatctgtgaacccttctcgggtgtcactgccgcctcggcgtaacccaatgctttgccggcttgttactacgtattatgttaaaatggccggaaaatcatgcggagaattgtgtggtaaatcttgagaaataaaaaaagcttagccgtttaggctaagctagtcataaatatgaaaaagcatcagttcatgtatctcgtttgtaagagcaggctcgtcagcgcgggcgggaaacaagtctccccattcaatctcaccgctcttatgatagatgccttcataatgggtccctttataataaaatgaaattttccatccgggcagcttttcttttgggaacaaaggtttccagctgaaatgagaaatcattacggccacgctccttacatttggtatcaattgacctaaataaaaacggcttatgttcattgtatcattgtttcagaacatcattgaagaggcctaaatatgcagtttgtcccagctttggataaagataagcccgctttattaaaaaagcggacaggttacgaaggccacaatgcttccggagatgtgattgccttctcagataaatatgacgcgtattcaaaacttcttcgttttgtaagagaatcaacatgatgcaaatttggatgagaaaaaatgcttcggcccgggcgcgaattcgcttcaaacatccatactttaccgttctgatcaatgccaaaatcgaaaccaatctccccgataaatccctcgatatgatcatgaaggacatggcttgcagtcagtgccgctgcagaaagctttttaatgacctcaactctttcagcgggatcatcgtatacttccgcaagtgtctttacagtgccgccgttagaaagatgtgttgtaatgctgttctttccggaaatttttacggcgattgctgtcactgtccattttccttttctgtttttattggtatggacacggaaatccgctggtttgccttgaaattcgatgagatcaacaccttgctgaatgagaaagtcggacgggttgtgatgtttttgaaattctgcaaggaatgaggcggcatcggaataatcaattgatgtaaaagttttggcgtcattcgtatgctttaccgtcaggccgccatctgttcttgtcagctgataaatgccggtgccgagtgctccatttgccggtttgatatagacttttttgtatgcgccacagagctcatcaatcagctccacagacggtgtcagctcggatctaggcaaaaagggtgccgttctcggatctttttcgagcaattgatgaacgttccatttattgaaaaacgttttattaaaccatgggatctgatattcatcgatcagcctcttttttgtatgttgcaagagaagtgaatcttcaatttttcggttcggcaaacggtcataaacgacgttcggcaatggaacgatttttttctcccagccgttttccctgtaaaggaggccttcaatcgtgccttcctcccaattgatttggtgcgcgccaaaaacgaagcagtagcccccggcttgctcgtgtaacgtgacaagtttagaaaaaaagagggaacgatccttaaatggacgttcaagagatacagtaaaccctgccgtaaagatgccgactaacggcccgatatgcactgtatgatcatgaatcagtatatcagccctgcttcggtggggaagcaaaagctcatgaaacagattttcagagagaagcacggtttgttccagatgccgtctgtaagcaacgtggcatctgacaaccttcgttccgaatgcggcatgcaaaagtccgtctcgcttcagcgaagagggcagaaacagggtattttcactggttttgtctatgccgatcaaaaaccgtttaggattcacgcggaagaactcctttctggctttgctcagaaaacagatattggcagcgctttaggggacaagtgtacagctgttctttttgctcgggagagacacgcaggattgactttctgcctggtttggaattgatatctaaaatccaaattctcccgtccttagcaagacatatatcaagaccgagttcaaacaacggcccatagcgctcgtcaagataatacggaaccgattgggtaatcgaaaacacatcatctagtaagaccacttgctgttttttcggtatatcttcaaaccaggagtcaaatgtcagcgcatcagatccgcctgacaaattggccagcagcccgtgtttgtatccgcgtcttactgcctttccgactgtattccattcacctgcttcgtttttttccataaacaggcgaatatcacaagggtattgttccttatcttgaatgtttaagtaaggctgaagcaaatattgatgctgaagcacttttttgcaccatgttttaaaagaagtctggttggaaaacgtttttgtctgcttatcctttccgatgtgataagtagcagtgatgtttttcttgcccagcttcaaaagaatcacgcctctgcctcccgcgccaaatgccggtttaaggatgcaggctttttctttggataaaaaggagtgaatttgttcgtagcggctcacctttatcgtttcgggaatatagggattgattacagagtgctgctgcaaatcgtgaaggacggtccacttatcgggaagaccccgcccgataaattccgttttcggatattttttgagccactcaacgattggttttgctttttgggaatgtgaatccttgccgtaaaaacagcgatcataaatataatctggaatcgccatttcagtttcgttccatgtgctgctggccgaatgatagaccgatgctttgacacgcaaagtgtcaggtgaaatatcaaatggtgtaaaccggatgaaacgtatgccgaattcgggtgctcttttggccagttctgcggaataatccgcttcatgctggcgggataaggacataaaaccgagtgttatcatggtgagactcccccttttattcaaaagctgccggcgggtgtccgcagctttacactaaatacatgtaagacgaacgcagctgacggtattctactttacagaatacgattctccaccttgccctattccaaaagaacaagctgattttctaagaacaggaatttgtctcctcgtttgctaagtgattgcatgagcctctataatacgtataggtacataatctatatgaaaaaagctgaagcacagatggaggaagatgaataggaatgggtattgcaggaacctttatttttatgatcgtgatcggcgctgccattggagcggtgaccaatcatttagcaattcaaatgctgtttaggccgtataaagcgtactatttgtttgggaaacgagttccttttacgcccgggctgattccaagacggcgagatgaacttgcaaaacaaatgggactgatggtagtcaatcatctcttaacccctgaaggcattaaaaagcggctcgtctctgatgcagccaaaacgcaggctcttcgagtgggggaacagctgattcaaaagctgtcactttctgaagtgacagtaaaagaagcgcttgaaaaagccgggatgaagcgcccagaaaaagctgctgatgcatggatcagcagctggaccgatgataagctgaatgagcttttccgccaatacggggaccaatcgttaaaagagctggtgcctatagaggtgcaggaaaagcttgaggaaaaaattccgatgatttcaggatatatattgtcacggagtgtcagttattttgaaagtgatgaaggaaaaatccgtcttggcaatatgattgatgactttttaaaagagcgcggcatgcttggaagcatggtgcaaatgtttcttggcaattcaagccttgcggatcgcgtgctgccggagctgctgaaattcttgcgcaatgaggaaacaaataaattgctttctgatctcttaaaaaacgaatggggcaagctgagggagtatacgtttaatgaagcagatgaaaaatggaatgcaaaggcgctcattttcagtttgaaacgaagagtgctgcaagcattttcgactgcccctttcttcgacaatacgattggcacgcttaccgtccgctatgaatctgagctgacccagcaaatgctgccggcactgttagacaaattgcttgaagggatttcgtccaaccttgaaagtgtcttaaaacggttgcgtcttgaggaaatcgtcaaggagcaggtggatcagttcccggtggagcgtcttgaagaaatggtgctgtccatttcaaaaaaagaatttaaaatgattacctatttgggggccttctcggcggaattataggcgcgattcaagcattgtttgtcatccttttttaagaagaaatggtttttgattaatgaaaggagctccatagtctgttatagtggagtggtatgtcaaacggcaatgatgaaaggagctatttacaatggctgttaatttttatgatgtagcgtatgatctggaaaatgcattacgcgggagcgaagagttcacccgtttaaaaaacctttacgacgaagttaacgcagatgaatcagcgaagcgcatgttcgaaaacttccgtgatgtacagcttagactccagcaaaaacaaatggcaggagaagagattacacaagaagaagtgacgcaggctcaaaaaacagttgcgcttgtacagcagcacgaaaaaatttctcagctgatggaagcggagcagcgcatgagcatgctgattggtgaattgaacaaaatcattatgaagcctttagaagagctttacggcagtgttgaaggctaataagcaaaatcccttcttggataagaagggattttttattcattcagcaaacttggaaatccaatgaatcttttacctctccattgatgatcactgataatgtatgaattcctttgtaatgctttctggtggttaaatccttaaaggattggtttcttgtgtatgacttcgtttcgttttttcgtatagttgtttctgttattttaaatactttctgatgacgctggcctcttgcttttacaaaatcaattgcgtactcaattcttactttttgatccctgtctgaatgaatatagaaagaaaattcaaggctttcgccaataactatacgtttgggctggcctgttaaatcatgtagttgtatcgaatcagcattttcataaccaaaaagcgctaaggcctgtttatcacccttttttaataaggtccgataggcgtgtttgataatccagtctgtatggggatgtgttccgtaccattgatctgcgacttttctcagtaaatgaggatgcgtttttgatatatcattaaggttgttggccacgctttttcttacatataaggactcgtcctgcatcagcttctcaaggatcggcaatacgggggaagggtccgatttcaaagccggtatcgattttccccatggcaggcggggcctgctgccttcgctcgcaagtcttctcacgtgttcatttttatgctcagaccatgcaagcaattgtgcaaccatcttttcttgatctaacagcaaaaaaggccttacagcaaattctgaggtcgaatattgcgtaaagtattccaatgcctttattgattcttcccaatgcgctaacccgtactgttccacataatctggaaataaaattccgctgagtcctttaaaatgaggggctgtatcccgtaaaattgtgagcgcttcaacgtattgttttggcaaagtttcgtataaagaaactgtcacgcggcgcatccgctcttttaaagtgagttcaggccagtcctccagccgtaatgtatcctcgaatctgtctttgttaaaatcaggataggatgaccttacatgatggatcaactgagatatcagttcttcattatatatttcttttaaatcagccatataaacaccgctttttcgtttattatttatattgtatgggaatgtacgttctggatcaagtgtatagtcctaaaaattaacaactgatcctaccacggatatacaaaagttggttactttttttagttaaaaaaacccttgtcatcggaaaagaaaactgagataataacattgaaagcgcctacacttacctatttcaaatggatacggtcgcatatcatgccgttatatagaggggataagcaacagagagtaagtgttcggagcgcatcattggtcaaacaaggggttcctgatacatgatttttcgtaaatcgaaataacgatattagggagaatggctgcttcgatcgtatcctatcaacaagccatacataaagtctgctgagccaggctttttttgctttaagaaaaggttgttctaaacacagagacagggtcatatcctatacacaagtacagtcatcaaggagggggacatctctgtgtcaaaacaattgcttgccttaaatatagatggagcgctgcttcggtcgaacgggaagattcatcaggcaacgaaagacgcgattgaatatgtaaagaaaaaagggatttacgtcacacttgtgaccaaccgtcattttcgctcagcacagaaaatagcgaaatcgctaaagcttgatgccaagctgatcacccatagcggggcatatatcgctgagaaaattgacgccccgttttttgaaaaaagaatttctgatgatcatacctttaacattgttcaagtgctggagagctatcaatgtaatattcggcttcttcacgaaaagtattccatcggaaacaagaaaaaggtgaattcgaatttattggggaaagcactcattcatccgtctgacccgatcttttatccagtccagttcgttgaatcattaagcgatctcctcatggatgagccggtgagtgcacccgtcatcgaggtgtacacggagcacgacattcagcatgacattacagaaacgattacaaaagccttccctgcagtggatgtgattcgcgtaaacgatgagaagctgaatatcgtcccgaaaggtgtctcgaaggaagcgggtttggccctcgtcgcttcagagctgggcctgagtatggatgatgtcgtggccattgggcatcagtatgacgatctgccgatgatcgaacttgccggtcttggggtagcgatggggaatgccgttccggaaattaagagaaaggcagattgggttacaaggtccaatgacgagcaaggtgtcgcttatatgatgaaggaatatttccgaatgcagcagcgaaaaggatttcttgataagttccacatgaaacgtgtgtaaaaaagccgctcgcaccctgacaggtgcggcggcttttttgccggattgattttagcagtttatttctgtacactaaagaaagttttgaatctgataaattaggtgatgaagttgcaaattaaaatagaaggcatacatgatgaccgcctgcatcggcctctgcaaaatattgcaaatttgttttatgaagagtgcgagcttgcgtatggcggagaggagcccgcagattttgtcatttctttagcgttgtcacaaacggatgagcatgtgacggtttcgggagaagtgaagggaactggcataaaggaacagcatacaaaattcttttctcccggcatgaatgaaaaagaagcttttaagcaagtgaaaaacacaatttcttatgtgtatctcaatcttcttcaggcgcatacgggcattacgcagaagtggggaatcctcacaggaatccggcccacaaagctgcttcataaaaaactgcaaagcggaatgtccaaggagcaagcgcatgctgagttgaaaaaagactatttaattcatgatgaaaaaatcatgctaatgcaggaaattgttgaccgtcagctggcggcagttccggatttgtaccgagtaaaggatgaagtcagcatttatatcggcattccgttctgcccgacaaaatgcgcgtattgcacattccctgcgtacgctatccaaggacaggcgggcagagtcggctcattcctatggggactgcattacgaaatgcagaaaatcggtgaatggctgaaggagcatgatgttaaggttacaaccatttactttggcggcgggacgccgacaagcattacagcggaggagatggatctgctgtatgaagaaatggtccgctccttcccggatgtgaaaaacattcgtgagattacggtggaggccggtcgtcctgacacgattacagaagaaaaactcgccgttttaaacaaatatgacattgatcggatcagcatcaatccgcaatcctacgaaaacgaaacgctaaaggcgatcgggcggcaccatacggttgaagagaccattgagaaatatcatctgtcacgccagcatggcatgaataatatcaacatggacttgattattggtttgcctggggaaggcgtgaaggagttcaggcacagtctttcagaaacagaaaaactgatgccggaatcccttaccgttcatactctttcatttaaacgggcgtcagaaatgacgagaaacaagcataagtacaaagttgccggcagggaagaggtttctcaaatgatggaagacgcggtagcctggacgaaagagcatgggtacgtgccttattatttataccgccagaaaaacattcttggaaaccttgaaaacgtcggatactctttgccgggacaagaaagcatctacaacattatgattatggaagaggtgcagacgattattggcatcggctgcggcgctgctagtaaatttattgatcgggatacagggaaaattacgcattttgcgaatccgaaagatccgaaatcgtacaatgagcgcttcgagcactacacggacgaaaaaatcaaatatttagagcagatttttgaaaaaacgacaaagcagcactgatcacagtgctgctttttttatccctgtttttttgcgggctgaacctcaggcttccatttaaataccttgttaagcaagcggtaaattcgttttgattcctttgtgacaagcggtcccaaaatcgccagaatgaggacatataatgcggcaaacggctttaatgtggccgacagtccgccggctatcccgagattcgcaacgataatcgaaaattctccccgcgatacgatcgtcagcccgatattcgatgaagccttatgagaaagccctgcgcgtcgtcctgccaccattccggcgataaaatttcccagaatggtcaaaatcactgcacccaacgcaagccaaaccgcttcacctagcgaaaacggatcgatactgaggccgaagctgaaaaagaacatcgcaccgaagaagtcgcgaaacggaacaacgaggtgttcaatcctatcggaatgctctgtttctgaaaagaccaaaccgagcagcagcgcgccgattgcttctgctacatgaatcgtctcggaaaacccggcgataaaaaagagcgctgcgaaaatgacgataataaacacttcgtttgagcgaatgtccaacagtttgttcaacagcggcgggagttttcttgctgcgataaaaaacagcagcatataaccgaaggcgatcaaaatggacaagagtgcactccctacggatgtcgcatcacctagtataaggccggaaacaacggacagatatacggcaaggaaaatatcttcaaacatgatgatgccgagaatcaattcggtttccggattggcggttctttttaaatcaacgagcacttttgcgacaatcgcacttgacgagattgtgatgacgcctgcgaggatgaggacttccagaaaggaaaatccggtgataaacccgtaaagcagtccgaggctgaagttaatcaaaatataaatcgtcccgccgaccgcgattgattttcctgatttgattaacttcccgacagagaattcgagtccgagatagaagaggaggaacagtacgcccattcgcccgaaaaactcgatgatttcactgctttgaataaatgttagatcaataatccccattttcggcgcgtgcggtccaacaagcattcccagcacaatcagaaacggaataatcgaaaatttaattttattggcgatcacactggcgattgccacaagcacaagtgcagttccgacttcaaatacaagatggtccatcggggctcacacgccctctccagaaagaaaatcgtgaatcagtttcttcagatgctttctctcacctgagaggacaagggtgtcattttcttcaataatcgaatccgctccgggatttaggagcttttcctggttgtgtttgataatcgcaataacagtgacatcgtaattctggcgaacatcaagctcaccgagtgtgcgtccgatcgatttggcgcctttttcgaccttaaaccattcaataataagatcgctgaaggccatttcgatggactccagagcttgcggtttatagaccatgcccccgagaatagctgcaatttgccttgcttcagaatcatccaatgaaatatttgaaagaagctcatccgggtcccggtcattaaaccggtaaatttcccttcttccgtcatcatgaatgataatcgtcattttttcgtggcttcttgtttcgatttcaaactttttgccgatgcccggcagatcgttttctttaatattcaatgaaaatccctccgaatgtagtgttggcagtatggggtgagttacaaataaaacttgagcaaattatattcggaggtaattagactggtatttgacagggacggcacaagccttttccagcctgtttatcagcggttcgtcaagtggtttgacagagagatgcctgacagactgtgccagcgggctgtactctttgatcagctcagccgggtgaatgctgcccggcgacggcgtttttgccgattgtgtttcctgcggatatgaggacataggcacatagctgtcagtgcttgcttcaaactgggaaggcagaaccacgtccgaagggggaaagtacaccataaataaacttaacagaaaactgatcagcaatttatccatgtcctttcctcccttctcatcaagatatcccttctttttcactatataaaactttatgtttccattcaaacaatatgcatttttcagtatctattgaccttgaaaaataaaaaggtttatttggggatggcggggaatgtataggagaaagaaaaaagtaagcgcatacatggaggtgcttttaatggagtttgttcaatatgcatgtaatggggccgttgcagagattatcctgaatcggcctgatgcccatcacgccctgaatgaacagatgctgtctgaattgaaggaggcagtcgaaatggcggctgcaagcgaggcgctcatcgttctcctgagaggaagcgggaaaggcttttcggccggcggtgatatcaggatgatgacgtcagagcatgaccctgaccaatttaaacggctgatggatacgattgaggctgtcaccctgaatttatatcagatgaagaaagtgacaattgcagccattcatggtgctgctgcgggactgggcctgagtttggcgctttgtacggacattgtgctcgctgaaaaaaacgccgttctcgcgatgaattttatcggcattgggcttgttccggacggcggaggacattatttgctgaagaaaagaatcggtgaagcaaaagcgaaaaaactgatttggagcggaaaaaaactatctgcctcggaagctgccgatatggggcttcttgatgggacatttgccggagaccctgccgaaggcgcaagacccattatcgaaaccctgttggcctcccctcttttggcgatgatcgaaacgaaaggtatttttcaaagcctccaaattgaagaactgaaaaaagtgctatcccttgagcgcagcgcccaagagagaatgagaaggaccaaggatcaccaagaaggaatccgtgcctttttagaaaaacgggagccgaagtttcaagcgtaacagatcagccggaaagctgatcatctgtgaaacaaaatcagctttccggctgcattgactaaacgatgagtatgactatgaagctctttttcttttaagagggcttcaccatgcgtttttgccgcttcttcatgttctgcctcgaattgctcgtttaccagcgtgttccccgaaggatcaaatacggtaaggaaataatcagccatcaggtttctcctccattttaaggtttatcagtctttcttcatttatattctaaaaaggaaatcaaaatcctttattatgctttatccaaaattagtatataatgggtcagggaaggaggagattcagtgcttacaattgatcacgtaacgaagacatttggagattataaagccgttgacggattggacttagatattccggaacagcaaatgttcggtctattaggcgcaaacggagcgggaaaaacaacaacgtttcgcatgatcctaggattattaagcattacggagggctcaatcagctggaagggccgtcctgtgaattatcatatcagcaacaaaatcggttatttgccggaagagcggggcctttatccgaaaatgaaggtaagggatcagctcgtctatcttgccagattaaaagggatggagaagcgagaggctgtaaaagagctcgggacatggcttgaacgcttcaatattacagattacgagaataagaaggtggaagagctttcgaaggggaatcagcagaaaatccaattcatttcggcagttttgcataagccggagctcctgattcttgatgaaccattcagcggcttggaccctgtcaatgttgagctgctaaaagaggccgtgatctcgctgaaaaacagcggtgtttctattttattttcaagccatcggatggaacatgtggaggagctttgtgagaacctttgcatattgcagaaaggaaaaccggttgtacaaggcaagctgaaggagatcaagcgttctttcggtaaaaagaatgttaccattcactccgatgacgatctgcgctttttgcagtcccatgaaggcattcttcaatggaaggaaacggcagacggcgtcaagctgcagattgccaatgaagacatttctcaagagatttttgcgatgctacagggaaaagggtttatcagaaagtttgagcttgaagagccgtcactgcatgatatttttatagaaaaggtgggggccgtctatgaataaattttggatcatgctttctcatacatacaaaaataagattatggcaaaatcctttattatttcgactgtcatcacggtgctgcttgttttagttgtaacgaatctggagtcgatcatttctttgtttcaaggtgacgatgcgaaagaaaaaatcgccgttgttgatgaaacaaacgaattatatccggttttttcaaagcagctgaaagcggtggatactgacggcgatcttgatgtgaaactgtcgaagcaatcggaggatgaggtcacaaagcaagtcaaagatgaatcactcgatggcatgctcatcatcaaacgagatgaaaaagggaccatttcaggaacatataaagcgttaacgatttctgatgaaagcacgtatcaaacactgcagcaggcgctgacgcaaaccaaaacagctgtcggaacagcggagctcggcgtgtcgcaggaaacgatcagcagcctttatgcgcctgttactgtggggcagaaggcgctgaaagaaggggcaaagtctgaggaagagcttggccagacggtagggcttgtttacattatgctgttcgtcatttatttctcggtgattatgtatgccagcatgatagcgatggaggtcgcaaccgaaaaatcttcgcgagttatggaaatcctgatctcaagtatgccgccgatccagcaaatgtttgcaaagctgcttggtatcgggcttgtcgggatcacacagcttgctattattataggagccggctctctgtcgcttaagctgaaccaaaagagcgaaacggcttcatctgtcggcggattccttaatttgaccaacgtatctgcaaccactgtcatctatgctgtcattttctttttgctcggatactttttgtacgcgacacttgccgcgtttcttggcagtgtcgtcagcagaatagaggacgtgcagcaaacgatcacgccgatgacgcttttggttgtcgccggttttatgatcgcgatgttcggtttgaatgcgcctgacgcaggatttattacggtaacttcgtttattccgttctttacgccaatgattatgttcctgcgcgtcggcatgcttgatattccgttctggcaggcggctgtcggaatcggaatcacactgctcaccattgtcatactggccgttatcggcgccagaatttataaaggcggtgtattaatttacggcaattcaagcgcgttcaaagcgatcaaacaagcgctacgtttagcgaaaaactgattggaaaacagcctggggattctcaggctgtttcttttttgacagaacgtgcattcgcaagaattcggtgctaaaataagggtacttcatcctggaaaggagcagaatgttgactgatctaacctttattcatgcggcagatcttcatcttgacagcccgttttacgggatatcgcacctgccggagccgatttttgcccggattaaagaaagcacgtttgcaagcgtgagacatatgatagacgccgcagtgagagagcacgttgatttcattttgctggcgggagatctgtttgatgaagccaatcgaagcttaaaggctcagctctttttgaaaaaacagtttgaaagactcagagagtgcggaatttcggtatatgtcatctttgggaatcacgatcatcttggcggggagtggacgccgattgaatggcctgagaatgtccatattttttcgtccgctgttccagaagaaaaatcatttttaaaagaaggcaggcgcatagcaagcatttacggcttcagctatcaagctagagcagtgacggaaaaccaagccgcccgctatcggagatcaactgacgcaccgtttcatatcggcatgctccacggcacgctctcaggatctgaaggacacgatccgtattgcccgtttacccatgacgatctcgtgaaaagcgggatggattattgggcgcttggccatatacataaacgccaggttctatctgcagagcatccggcagtcatttacccgggaaacacgcaagcacgccatatgaaggagacgggagataaaggctattatctcgttcatgtgacaaacggagatatatcttatgaatttcagagagcgcatgatgtcctgtgggaaaaagcggcggttgatgtgacggaggcaaataatatgaccgctctcttccaaatggtggaggacacgttttcgaagctgcggaaaaaggggagccctgtttgtgtaaggcttgttttacaagggacggcgccggaatggctgctggaggcgccaaaaggcaccttggatgagtttcttgaagctcttcaggaacaagaagcggaagaggaacatttcgtttggcctcttggattggacgatgagacagaaaacgaagcaaacctaacaaaccttgatcctttttttggcggtttatttgaagacattgatcgcagcgatctgtcagacgtgctggaagggcttgagcggcatccagtgtatagaaggcacgcggaccggtttagccaagaggaggtaaaggaaataaaagagcaggcacagatattattgaaaagacagcttaaggtgcttgatacatgaggcggtgacagctttgcgaattatatctttacatatctaccaatacggaaaattttccaatcggacctttgacttttccgcctctcctgtccaagtcatctacggattaaatgaggcaggaaaaacgacgatgatgtcattcattgaaagcatgctgttcggttttccgaaaacgaaaaagtatgaaccgaaaacaggcggtgtctacggcggtgttcttgaagctgaacatcctgagtatggggtgctgaagatcgaacggacgaaagggactgccgaaaaactaagcgtgtacacagaaaagggcgaagtaaagcagggagatgttttaaagcagctgttccagggcacagacaggtcgttgtacaaagccatatattcgttcgacgtattcgggctgcaggaaattcacgcctttaatcgggacaagataggggaatttttgctcttttccagcttgtttggtgctgaagccgtatcaaagcttgattcaaggctgacgaaggaaagcgaaaggctctataaaccaaatgggcgaaaccctcaattgaatcaggagctggaaacgcttaagcagctggcagttaagctaaaacaggctgaagcagaggaagcgggctatcatcagcttctcgaggaaaaacgaacgcttgaagcccgccttgcagccgcggaaaccgaattgaaagagacggcgggacatatccgaatgattgagggagcgattgagcgaaagccgctgctaaatgaaaaagcgacactcgaacaggtgattgcagaatttccggaacacgcaggacaatttcctgctgacggactgcatcagctggaaaaatatgaatcccatcttcacccgaaatcagcacagcttgaggcgcttcgggtgaagatggcggagttggacaaacagaggcaaaagcttatccccgataaagaactattggcgaaagaaacgctgatacaagagctttcggcagcgtttcatatgtaccaatcctggggagaacagctggcagccattcaggcacagctgcgccagacgtctgcgcagacagcggcagggctggaacagctcaataaaacggatgaaaatgagctcctgaatatgaacacctcatatgattatgaatggcagcttcagcaagcggtgcagcaatatgtacaggcaagagacagaaaacggcagcttgacgagacgtttgaacttgcccggcaagagctggaagacgcggaaaaggccgttcgtgccgcttcgtccgcgattcttgaaaacagccaaagaaaagataaagaagcagctcttagagcatatgatgaaacacaggggcagcaccaagagcaagcgaagctcagagaacagctaacgttttttgaaagacagcaggctaaacagaaaaagactgtcattgcagctggtatgttgttcatcgttctcttttctctgctgcagcaatggattcccgccataagtttcggcgctgcacttattgtgtattggcttgtttcaggaaagtcgtcttctcgaaacagccgagagacaagacagcccatgacggatatttcaccagcagaagctgaaatgcttagagaagcgttatgggaggatgaccgcaataagcagcaccttctcacacagcgtgcagcgctccagcaaaaagaggcggcgtatgaaagggtcatccagcagtttgaacagtgggaagccgaaatggcgccgtcctttacacaggttgagcgttttatgaatgagctcggatttaaggaagatccatcatttttgcttgatgcatacagcttaatgaaggatgttaaaaaagaagtgaagaaaaagcatgagctgaccatagaagcaggcaggctgaaaaagcaccggagaacattcgaagaacgcgtcagtatgcttcttcccgtgaatcagagtcaggatatctccatttcggacgcccttcacacattgcggaaaaacattgaacgtgaaaaagaaattgagaagcaaaaaaaggaaattgaaacagatattcattatacaaaggaacagatgcttgaacttgagcaagaaatacagtatttccacgcacagattgaacagttatttgccgcggctgctgcaaaagacagagatgcgttttttgccatagccgacatcagcaggcaattgaagggtacggagaacaagcttcatcacgtaaacgcacagcttcaaggcgggtacccggaggaacttgaactggcggattccaatacgctttctgaattgaaagataagcaatttgttgagaatgaaagaaaagagcggctgactgaggagatcgagcagctccgcagccaaatcgcactgctctcagtcaaacaggaacaattagaggcttcgggaatggtctcagacctcaagcttcaaaccgaaatgcaaaaagaacgtgtgaaagaaacggctaaaaaatgggcctccatacaaatggtcagacaggtgatcagaaacaaattggagcggcataaaaaaatcgagcttccgcgccttctagagacggcaggagaatttttccgccctctgactgacggaaactaccaaaccatttatttttccgaaacggatgattcgatcatggttatgcatcgcgatggaactgtctatcatgcggaagagctgtcacaagggacatgtgaacagctgtatacagcgatccgatttgctttggccgttacgcgccagggtgggtcaaagcttccgttccagcttgacgacagttttgttcattttgatcaggaaaggctgaaacgtgtattacatgttctgtatgatttatctgaaggcggtaggcagattttgtattttacatgccatgagcacgtaaaagatgcatttcatagcagccaaatcatccatttggtgtcataaaagaggttctatagctgaaaatcggtatgtgatatactggtattatgtaagatacggagggagctttaatagaatggctaaagggattatgctacatgaggttggcgaacaggtggaccagtatctattgattaaatcctcgacgaaagggattgcaagcaatggaaaaccgtttttgacgctgatgctgcaagaccagtcaggcgatattgaagcgaagctgtgggatgccaagcaaagtgatgaagtgacctatgcgccacagacgattgtcaaggtcgtcggcgatgttcaccattatcgcggacgcacccagctgaagctgagaaatatcagaccggtaagcgagcaagaaaacgtcaatattgatgattttttagaaaccgcgccgattccgaaaaatgaaatgatggacaccatcactcaatatatatttgaaatgaaaaatccgaatatccagcgaatcacaaggtttttggttaaaaaacacgaagctgagtttatggattatccggcggctacgaaaaaccaccatgagtttgtctcaggtttggcgtatcatgttgtctctatgctgaacctggcgaaagcaatagcagatttatatccgtctcttgatcgtgatctgctttacgccggtgttatcctgcatgatcttggaaaagtgaaggagctgtccggccctgtttccacttcgtacacggttgaaggcaatttgctcggccatatttcaatcatggtgacagagctttcaaaagcggctgaggagcttcaaatcgattctgaagaggtgttaattcttcagcatttgattttgagtcaccatggcaaagcagaatggggcagcccgaaaccgccgatggtgaaagaagcggaaattcttcactatatagacaatctggatgcaaaaatgaatatgatggacagagcgcttgagcgcgtgaagcctggcgagtatactgaacgtgtatttgcactggaaaaccgttccttttataaaccgacatttcataaataacttaaaaaggactgatgctgacatattcagctcagttctttttgatgcgtctttcccgcacataactcgtctcattcccgcatatggttaagaataaagaatctatgcaaagggggaggagcccgtgttattttttccgtggtgggtgtatctttgtattgtaggcattattttcagcgcatataaacttgtgacggcagccaaagaggaagaaaaagtagaccaggcttttattgaaaaagaagggcagatttatatggagaggatggaaaaggagcgagaacgccgcagttctcagcagcatgaagaagaaaatcaaaaccattccatcgcataaaaaaagctgtgcggctcaatgagcctgcacagcttttttattatttagaattgcttgaagatgaagaagtgctgttacttgttgaagatgtattaaatgtgtctttcagatctttatcttttacttcgatgtcagccttcttcatgactttttgaacagcttcctgaacggcattgctgtcatttagtttttgttcaagcacttcagatttcagttcttttttcatatcttcatattttccgcgttcttcagtctttttgatgatatggtagccaaattgtgttttcacaggattgctgacttcatttgttttcaacttgaatgcagcttttctgaatgtggaatccagttgttcgttatcttttgaaatccagccaagttcgccaccgtttgtagcagtggagtctgttgagtattctttcgcaagatcttcaaacttttcgccttttttcagctttttctctacttcttcagctgtctttttatcagcgacaacgatatggcttgcgcgaatctggccttttaagccttcccagtattctttaatttcatcatctgtaactttgatgttatctttagccgctttttgtgtcagcaattcatattttacttgttctttcaggtaatctttgccatattgcttttcgagggcagtatattgatcgccaagctgcgttttatattctttcagcttgttgtcaatttctttatccgaaactttatacttcttgtccaatactttttcttgcactagctgtgtcagtacgcttgcgccagctgttttcttcatgtttgtgtaaagctcgccttttgtgacatcgcctgcgtctgtttttgcgataacttctttgtcgccgctgctgcaagcactgagagcgaggatgcttgtagcagtgatagctgctattgcgattttcttcattgttttcaaacactcctaatcattccaaattaaattacctatgcgtatcataacatattgtggctttctgtaaaaagattttaaataaagggcattcgtctagtcaaacttttgctgatgacatacttatatattgatcaagaaaaggaggtatgtaacatgagcggaggatactctaacggattcgcgttgctcgtagtactgttcattttgcttatcatcgtaggtgcagcttacatctactaagcagcccgaggatcgcttgcaacataagcgatcctttattttcactagcgcctaatcgtttcaaacatgaattgcataacatgtaattggtaaataaagcttattacaggaggtgctttttaagatgggtgaagtatttgcaggcggattcgctttattggttgtgttatttattttattgattatcatcggcgcttcttggctgtactaatcaacataaaaaagcatagctgcttaatcagcagctatgctttctttcgtatttacactgtaaaggagatctccacaaacgaagagatcagtaaaattaatatagatacattaataaatcggaataccttatcttgccgctcttcaggaatctctctgacaaggcataatgtattggtgagcctgtttatgaaatataaaataaacacggcagccacgataaaatagaataaaatgatgggagattccccctctctctgaactgtcccatattacattaccaaatatttattaaaaaagatagaatgcaaattgaaaaatcgccaccagcaccagggtttgactacttttcaacaagaatatccaagccgtcagcttcctgatcaataaaagcggttttcggtgcttttatcagcttgagagccagcaggaaatcaggcagacagtagccggcgtgaatgcccgagatcatgcagaaataatgagcgtgattcggaaatgccagtgctgcgtaaaacaataccggtgtaatcagcaagaacgggctgacgagtgaaatcagcattgttgtttttggtatacgtttccatgtgcgcatgcgcaatatggaaaactttttttctatttttctttttttgcagatgattggcaggacatggatgactttatgtgcaaataaaataacgacgagcaaaccgccgaataaagatacatattcatcgcttaagcttgtgccaggccgcagcagctcaaaagctaaaaaggtagatataaaaaccaaaatcataaaacatacagcagttaatattatgcgaacggcgccataatccttcatgagatttatggtcttccagcaattcatcaaagtcatccttccatacatcttgaatagaatctcaaaataatttactcctcccaagagaaaaaatcaatgcttttttaagaaaaaatatcatccggcaggtatttttttgaaacaagcaaacaaactgcgaaatatggggttagaactttcttctcagtgaattatcagctaaaataagattaaagatagaaagaagtggtgtggatggattcgatggatcatcgcattgagcgattagaatattacatacaattattagtgaaaacagtagatatggacaggtaccccttctatgcgcttctcattgataaagggctgagcaaggaagaaggggaagcggttatgaggatatgcgacgaattgtcggaagagctggcaacacaaaaagcgcaaggatttgtaacctttgataagctccttgcgctttttgccggacagctgaatgaaaaattagatgttcatgaaacgatttttgccctgtatgagcaggggctttatcaagagctgatggaagtctttatcgacatcatgaagcattttgattaactgtttacaggttcaagctcttcagccggttcatccgccgcactgtcctttgcttttttcttcagttttccgtttacgctttcaaagtcattgtcaatattggtgagtgacgtttcgaaaatttccataaaatcatcgccgtagatatggcgtatcatacacatcatttctgccacttcaggaaattttccgaataaatgatacaaaggctgtgaccctttaaaaacagcgttgcgtgtcggatcaaattcctcaagcaagctccagaatacctcggtaccttcctcagtcaattggacatatgtgttccgtttatcattcagccgtttggagaaccttaaatatccccgttcttccagcttttttgaaaagttgaatgcggttgatacgtgcatgaccccgaacttcgcgatttcagaaatggaagctccattcaattgatacgcaatccataaaatatgatgctcattaatattcaggtcatacggtttgagccattgctgccaatccttctcgatcgatttccaaagagctttgctaagctgagccattttctgggtgaaaaccagagcttctttcacatcatagggcggttccactcgattcattacgtcacctgcttctctttttctttttctctattatgccaataaaataaagattaataaagatgaaaatgtaagaattttttaataaattcacaaaccattgcgacgaaagggtttttcggccaaaaaaaaatacgggtccaattttggcccgcatttttttcttttgaataggatattagttttgtaaggttttctccagctgtctgattttctcttcgatatcggcaatttctttttgcagatcctgctggtgaggcttgatctcttcctgccattttttaattgacgtttggagctcgccgcccacgtctttaataacatccgtgctttcttttgccgctttgatcagctggtcttttaatgcaagcccgtctgactttaagcgtttgattgtttcttcaaaagaatcataattggttttcattttttcacgcagctgctttcctgaggaaggtgcagtaagaagaaccgctgctcctccgatgatgccgcctacgaatagtcctgttaatagagaacgtccgctcgccattacaatcaccccgtctttttcttcaaaataggattcattcagcatttttcatttttgttgaaagcctgaacttctatacatagcttgctttattttagcatattttttaagtgaaaaggagggagaaggttgtctgtctttttgattgtattatcctgcatcacccttgccttcgcttcaggcgctgtttactatatcaaacttctcagccaggctgcttcttatccgcccaagagggttatccggcagaaagcgcttgtttgttcaaccggaaccgcctttacactatgtcttatctttttcacaaaactcctcgcttaaaacatgctgacatgctgcgggcgctctgttcaaaaaaacctctcccggaagcggaagaggttttgtgtgacaattatttagcagcttccataaagcttgaacgccttaaaatggtttgcacaatcggataaataatgatcattgagattgtattcagcacagcggccggcagaacaacagccgcgaacaatgcggcgaaaccgcccggtaaaccgacgatcaataaagctgacgatagaaacacaattcctgataagatggtcccgatcactgtcagcacagcggctgcacctgttttccggctctttctgaacaagagaaacagggagaagaacagaaacgctgatacgggtttatcaatgatgttagggatctgtccggctggaaacgcggttgtaagcgcggaaatgattccggtcacgatcccgatgacgagtacattttgcacccgcgggaacagcagaatgcccatgaacatcatgatcagcatcatatctggtttcatgccgcctaaaaagggcggaataatggaatgaagcgctgcgccgatagcggcaaacagagccataatgactaactcttttgttttcatatctatgctctcctctgctaagcttttgccctccaataatatgctcatcatttattgcgaaggctttacagaatgtgttatgcaaacagtataccaaacgaacggtttgcatagccagactttttactcattttcctgctggaatttcttcatgaacgcagctaatttttcacagtcttcgagagagaccgcgttataaatagaagcgcggcagcctcccaccgaacggtgtccgccaaggccgatcatcttcgcatcttttgctttctggacgaatgttttcgttaattcgtcatcccgaagcgtgaaggtgacattcatgcgtgagcggctgtcttttctggcatgtcctttatagaagccgttgctttcatcaatacagctgtagagaacctgcgctttttgttcattgcgctgttcagcagtttccacaccgccgttttccttgagccactccagaacaaggctcagcatataaatcgcaaatgtcggcggagtgttgtagagtgaatccgctttgacatgcgtggaatatttcaggatttttgggacgttcgcattttcatttttcagccagttttttttcatgatgactacagtcacgccggaagggccgaggttcttttgggcgcctccgtagatcacgtcaaatttagacacatcgatttttctgcttaaaatatcgctggacatgtcggctacgagcggaattggagaattcggaaactcctgccactgagtgccgaaaattgtattgttggatgtgatatgtaaatatgcgccgtcttttacatccgtaaggtcaacctctggaatatagctgtaattgtctgtttcacttgtagcggtgatagacgtgttcccgaacaatttcgtttctgccagtgctttttcagaccaagcgcctgtcatgacaaaatgtgcggttttttcaggtgttaaaaagttcatcggaagcattgagaattgaaggcttgccccgccttgaagaaacaagatatcgtaatcttccggaatgcccatcagttcgattaagaggcttttcgctttttggtgcaccgcttcatactctttgctgcggtgggaaagctccataatagacatgccggattcgttaaaatcaataaattctttctgtgctttttgcagaacttccagtggcagcgctgcaggacctgcgttaaaattcgttgtacgttccattatgatctctccctgttttccacgttaatgtataaaataatacaattatcctatcacaaaaattcagttttttgataaaaaattagaattatcaaaagaaattgacggatgtttgcgaaatgttcacaaaataaaataacctcatcttatgatgaggccaggcgttttgcgatagaggaagagatgttctgcagatcctccggtttataatcatcagcatgcgttttccaaaccgctccgaatccatctccttttccgtagcgagggataatatgcatatggtagtggaacacagattgtccagctttttcgccgttattgttcagcgtatttaagccgatcggttcaaattcatcccggatagcgcgggcgattttcggaacagcatggaaatattgttttgctaattcatctgtaaattcatatacattctcaatatgtgttttcggaatgacaagcgtatggccttttgtcacttggctgatatcaagaaaggcaagtacatgttcatcttcatacaccttcgcggatggaatgtcgccggcgataattttacaaaagatacaattttctgcacaatgcatgagggttcctccttatgaaattgtttagtatgtatacactcatcgtaccacagaaatgcagaaaatagaaaacaggatgaacggcgagcgttcaccctgaatgcagaggaagagcttatatgaagaaaatgtgttatgcctttggtaagcacctcatttgtcaataaaatgaagacttgtttaatgcctaacgattcctgcgataaacacctcatttgacaatttgcttcatacatgaagaattcatcaattcagtgaagagaaatggtttgagcattggacatgtttattttctatccaactgtttctaagacgtctttgacaaacacctcatttttcagttgatatgcttttcctctacaactattatgatgtccagaaccctgtctctttatgacagcaaattcatcatttgttaaaagggaattgtttcaaatcaggccttgtttttggtactatgaagaaaaacactataaggggagaaactatgtctctgctatcggtaaaagacttgaccggcggatatacaaggaatccggttttaaaaaacgtatcattcacccttgaaccgaatcaaattgtcggattaatcgggctgaatggtgctggtaaaagtacaacaatcagacacatcatcgggctgatggacccgcataaaggttcaatcgaattaaacggtaaaacgtttgctgaggatccggaaggctaccgttcacaatttacctatatacctgaaacacctgttttatacgaagaattgacgctgatggagcatcttgaactaacagccatggcatatggactgtcaaaagaaacgatggagaaaaggctgcctccgctactaaaggaattccgaatggaaaagaggctgaagtggttcccggcccatttttctaaaggaatgaagcagaaggttatgattatgtgcgcatttttggcagagcctgcgctctacattattgatgagccttttctagggcttgatccgcttgccattaacgcgctgcttgaacggatgaatgaagcgaaaaaaggcggggcgagcgtgctgatgtcaacacacattttggcaacggcagaacgctattgcgattcgtttattattttacataacggcgaggtgcgggctcgcggcacgctgtcagagctcagagagcagtttggaatgaaggacgcggcgctggacgatttgtatcttgagcttacaaaggaagacgctggccatgaataatatgcttgatatttggcagtcgcggctgcaggagcatatcaaagaaacaagaacatacatgaaatatatgctcaatgatcacctcgtcattgttttgattttttttctagcgggcgctgcaagctggtacagcaaatggatacgggacattcccgctcactttccatccttttgggtgatggccgtgctgttttcgctcgtgttgacaagctcttatgtgcgaacgcttttgaaggaggctgaccttgttttcttattgcctcttgaagcaaaaatggagccttacttgaagcaggcgtttgtctacagctatgtgtctcagctgtttccgcttattgcgctgagcatcgttgcgatgccgctttatttcgcagtcacaccgggggcttcgctcgtatcgtatgccgcggtctttgtccaactgttgctgctgaaagcgtggaatcaggtaatggaatggcgaacgactttccaaaacgaccgcagcatgaaacggatggacgtcatcattcgctttgcggcgaatacactcgttctttattttgttttccaatctgtttatatgtatgcgcttctcgtctatgtcattatggctgtcctttatctgtatatgtcttccgcagcaaaacggaaaacatttaaatgggaaagccatattgagtccgaattgagacgaaagcagcgtttctatcggattgccaacctgtttactgatgtgccgcatttgcgaaagcaagccaaacgcagagcttatctcgactttttgctgcggcttgtgccgtttgaacagcgcaaaacatttgcctatatgttcacccgcgcctttttgcgttcgagtgattatttgggcattcttgtcagattaacgatcgttttcgcgctgatcattatgtatgtctcagctagcccgttgattacagcggttttgactgtgtttgccattttcattacgggcattcagcttctgccgctcttcggccactttgaccatctggcgcttcaagagctgtaccctgtgaaaaaagaaacaaagctgaaaagctatttctctctattaaaaactgcacttagtattcaagcgctgctgatgtctgttgcatctgcctatgcagccggcttgaccggttttctgtacgcgctgatcggttctgccgttctgatttttgttgttttgcctgcttatatgacaaccaggctgaaaaagcacggaaagctgtgaactgaaaagaggtaatcaaatgacagataatcagctgctgatgcaggaagctttggaatggaaaatgcattttttgcgaaaggattccatgtttgaacgcttttcgaagcgtgtgcagacgaaggtgaatgaacggattcctgaaaaaatccatacggtcgtcaccgagagtgtgaaaaaaatggtagaagcgacaatgaccggctccaatatcatcacttataaaaaggatacaagtgcactgtcgctcagtgaaaaaaatgaattggcgaaaaaaacgattgtttcttatcagaaagtgggagctgctgagggagtcggcaccggagcgggcggcatttttttaggcattgctgattttccgctgctgctttcaattaagatgaagtgtttatttaccttgtcttccatttacggctttgatgtgaaagatgcacaagaaagaatgttcttgctgctcgtgtttcagcttgcgttttcgagtgatgatggccgtaaatcgcttttttctgtcatcgaaaattgggagacggagaaaaagagcatcgactggagagtgttccagcaggaatatcgcgattatatcgacgtcgtgaagctttttcagcttttgccgggcgtaggagcggcagtcggcggaattgccaattataagctgcttgctcagcttggagaaacggcaagacatgtttttcatctgaggatattaaaggaaacagccggagaataaacactccggctgtttttttatagctgatgataggtgatcgcagcgccggcaaggaccttggccgctgtcagcatggctttttcgttgatatcaaatttcggatggtggtgggaataaactcggtctggctgttcgggagcggcacctgtaaagaaaaaagtgcctttcacgttttgtaagtaataagcaaaatcctcgccgcccatttgcggttcaccttcaatgacctgctgaacgccctcggtattctttgcggtgctcaccaagtggctcgtttcggcaggatggttcacaaccgccggataaccctgttcataggtgtactcataggacgcgccgtgcatgctgcatattccttttacaaccgctttaatttctttctccagaatgtcccggacattttcatcaaaagaacgtgctgtgccgatgagtactgcttggtctgcgatgacattaaacggattgtctgcgatgaaggaacctgtcgaaatgacggcggattgaatcggattgactttgcggctgacaatgtgctgcaaagaggtaacgatttgagaaccgattaggacggcgtctttagtatcatgcggatgagcgccgtggccgccctttccgaagactttaatcgtaaatcggtctgccgccgccattacggcaccggggcggcaaagaatggttccgagcggctcagttgcccaaagatgagtgccgaatatcacatccgcgttttcgagacagccgtcatcaatcattggctttgcgcctcccggataatattcttctgcatgctggtggatcatcacaaatgttcccttcagttcatgtctgttttggtgaaggaccttggccactgcgagaagagctgcggtgtggccgtcgtggccgcatgcatgcatgacaccaggcactttggaggcgtaagggacatctttttcatcttgaatggggagagcgtcaaagtcggccctcaaagcgactgtagggccgggttcgcttccttctatatatgctaaaacccctctgccgccaacgtttgtgcggattgggactcctaacgattcataataggaagcaataaatgcggcggttttttcttcttgaaatgagagctcaggatacatatgaaaatggcgcctgatctcaaccatttcttcaaaacagccgtcgagctgtttgtttatctctttctgcagtgtggatatggacaaagccgcttcccccttttctatgttttccatgattgtatataaaaagtctgaatatttcaactcatgctgttttaaagcatcatcacagctgcgagggttgtcaccaaaaggccaatcgcgacgggaatgaagttttttctggcaagctcaaaaggatcaactttgcaaatggccgcggcgggaatcagcgcccatgggactagtgttcctccgcccacccagatggcagagatttgtccgagcgcggtcagaacggcgggatcggcatggagagcggacgaaaagagctttgcgatggagccggcgagagaaatgccagaaaatcctgagccgtcaaggcctgttatggctccagcggcagttaatgcagcggcggcaagctcctttgacataggcatcatatgggataaagcaatgccgagatcgttgacaatgccgtgggaacctttagggagtgaagtgcccagtatgctctcatagcctgagtcgccaagataaaagaaagcggcaatcgggatgacggggccgaaaaccttaaaaccgaatttaaatccgtcaataaaatagccggtgattttttcaagccctttatgcttatacacgaaaaaatgaacggtaaggaggatacagattgcagacccgccaattaacgcggtggcatcatttccttgtaggttaaacaagagcatacaggcgatatctgcaagaaaggcaagcggaatcaaaaaagccagtatggaccgcaggcgttttggtaagtacagcgagttgtcttgttcgccggaaagaacgggggaaaaagaagcgggatgctcctgttttttgcgttcgcgctgaatcatgataaaggcagctgttgttgttgtcacacccataatcagcacaagcggaatgctggccgagacgacatcaccgactggaatgcctgctgcatccgcagtcagctttggcgccgcctgaatgacaaagtctcctgacagggcaaaaccgtgtccgaataagttcatggccatggccgcggcaagaggcgtcaaaccggcacgtgcggctgcggggagcaggacggcgccgatcaaagcgacacccggagaaggccagaagaagagagaaatggcgaacatcaggcctccaatcagccaataggcagtcacaggccctctcacaaggcttgcaaagggagaaatcatcgcttcatttatccctgtttttgttaacaaatcactcattgaaacgataaagcaaatgatgaaaatcgtgggcagcagttcgccggccgcatagataaagctgtggaataaactgctgacagaagctgaaagtgaatggctggcccatagcgatatgataaaaatgccgaatagagaaataaatgtcgtgtcttttctcagcagcataaataggataattactccgataaaaaacacatacagaacatggacagacaaaatcccgacttccatcatcgatcactccttccgcttacagattattcataggcgggcggaaggtgccgggacagaggggagggttatgatggaagatgaacattgatctgtttcagctgctcatcagatgatgccttaatactctattcgctttttgcagatgttttgggaagcattcaggagaaaaaatgacgcacccttcagcaaaccagttttttctataggcgatgatgctttccgatggctctaaatatgaatcatcctcgtgctgcatctcgtaatcatcaaatccgaactgaaaaccgcagcacgggcagatttcatgagaatgattgccttcatgatcatatggcggttcagtcaatcccttaaacccgcagactgggcaagtatgcttcattttgctttcctcccaataaaataagctgccggacatgccggcagctattcgacagcgaaatatgtggtgacataggaaggccgggagaagatcgacgttgtgtcaattccggcagatgtatcgcgttttttgtgggcttctttgtaagaaccggactgctgccagtcttgaaaggcgctttccgtttcccacaaggtcagaatgacataggtgtcactgtcaagcggacggagcactcgaattgcttcaaagccaggctcgttttcgacttttcccgctctgtttttaaatctgttttcaaacagcggacgtccttcctgagtgacggcaatattgttcaatactgcaaaaccgggatgtttgatctctccgacttggtcaatgacttcataagcgtgtggtgcctggaaaacggtatctccgtttgtttcatgaatcaaaatggcgttttcctgcccctgcatcaaaaggatattttctgagggatgcttttctacgatcgtttttaaaaaatcggctgtcccatatgtaatataaaccttcatatcagccacctcctgcttgctagtatatcaaaacaatggtataagtttctattggcgagtgcttcgaacataattccaaacaatttttcccatactacctttagaaaggcgaggtgagttcatgtttaagataaagaaaaagaaactttttatacctatcattattttagtgttaactgcttttctcgctttaataggatatatttcaattatttttctcggccattatgtcatagatgaaaagaagctgatacttcatgcttcttcaaaaattgttgatcaaaacggagatgaggttgcaagcctgtatacagaaaatcgtgagccggtctctatcaatgagattccaaagcaggtcagagaagcgtttatcgctgttgaggataaaaggttctatgagcatcacggcattgatgcaaaatctgtcggaagggcagtgtatcgcgatatattagcaggcggaaaggtggaaggcggaagcacgatcacccagcagcttgccaaaaatatttttctgacacatgacaaaacgtttctaagaaaaacaaaagaagtgatcattgcgattaatcttgaacgggattacagcaaggacaagctgcttgaaatgtatttaaatcagctttacttcggacatggggtttacggcatacaagcggcgtcccactattattttaataaagaagtaaaagatttgactgtatctgaaggcgctgttttggccgctattccgaaggcgccttctacgtactctccaattttgcaccctgataaaaataaggagcggcgtgatacaattctaggtatgatgaatgaccaaggctatatcagtgcgaaagaggctgtcaccgcacagggccgaacgcttggactgcacgtgaagaaacagtcggaaaccccttggtttgacagctacattgaccttgtgatcaaagaggcggaagacaagtattccatttccggagagcagcttcttcaaggcggatacacgatcaaggtgccgctcgattcgaagctgcagaagacggcttaccaggtgatgaaagagggaagctattatcccggaacagatcagaatgccgagggaagcgcggtatttattaataacaagacaggcggtgtagaagcggccatcggcggaagggattacacatccaaaggatataaccgtgtcacagctgtccgccagccgggttccacatttaagccgcttgctgtatacggaccggcgatgcaggaaaagaaatttaagccatattctctattgaaggatgagttgcagtcctacggagattatacgccgaaaaactacgacagcatgtatgagggcgaagtcactatgtctgacgccattacgtacagcaaaaacgcgccggctgtctggacgctgaatgagatcggcgtcgaaacaggaaaatcttatttgaaagcaaacggcattgatatccctgatgaaggccttgctctcgctctaggaggcttggaaaaaggcgtttcgccgctccagcttgccggcgcgtttcatacatttgccgcgaatggaacgtatactgaacccttctttatctcgagcataatagatgaagacggagaaacaatagccgattataaagaagaaggaaagcgggttttcaacaagcagacgtcttggaatatgacgagaatgctgcagcaggtagtcaaaaagggaacggccacgtccggcacctatcacggcgacctggcgggaaaaacaggctctacatcttatacaggcgtctccggcgcgacaaaggacgcctggtttgcaggctatacgccgaaaataaccggggcagtctggatgggctatgacaaaacggatcaaaaccattatttgaaagccgggagctcatacccgacgcggctgtttaaggatattttgacacaggcaggagaaaccggtcatgtgttcacaaagcctaaaaacgttaaagacctggaaagcccgattgagctgaagccggtcaaaacactcacagccgattacacatttaaagcagcggggctctttactattgaattaaagtgggacgctcaagaggatgatcgggccgtatacagaatttatgtaaacaaggacggcgaggagacgcttcttgattcggttgaagggaagggaagctatgaaattccttatgccaacttattttcgggcgcgtcttataaaattgtgccttataatacacagacaaaaagagaaggggaaggaaccgattacgttcagccgaaattgttttcctcttaatggaattcggcgattttttgaactttgagctacatttctataccatttgcctaaaacaaggtatagtgtaataagtcaagaaatacgaacgtatggttgccgtatgaaaggtggaaatcagatgagtaaacgagaaacgtttaacgagacgtttttaaaagctgcgcggggagaaaaagcggatcacacgcctgtgtggtatatgagacaagcagggcgctcacagccggaatatcgcaagctgaaggaaaagtacggattgtttgagatcacacatcagcccgaactttgtgcgtatgtcacaagactgccggttgagcaatacggagtcgatgctgcaatcctttataaagatatcatgacgccgctgccgtcaatcggtgtggatgttgaaatcaaaaacgggatcggtcctgtgattgatcagccaatccggtctctggcggacattgaaaaactcggccagattgatccggaacaggacgtgccgtacgtgcttgagacgattaaactgcttgtcaatgagcagctgaacgtcccgctcatcggtttctcaggtgcgccttttacgcttgcaagctatatgatcgaaggcggcccgtcgaaaaactacaataaaacaaaagccttcatgtacagcatgccagatgcatggaatctgctgatgtccaagcttgccgacatgatcatcgtgtacgtgaaagcgcagattaaggcaggcgcaaaagcgattcaaatctttgattcgtgggtcggcgcattgaatcaggcagattacagaacatacatcaaacttgtgatgaaccggatcttttcagagctcgcaaaggagaatgtgccgctgatcatgtttggcgttggcgcaagccatcttgcaggtgattggcatgaccttcctctcgatgttgtcgggcttgactggagactcggcattgatgaagccagatcaaaaggaattactaaaacagtgcagggcaacctggacccgtccattttgcttgcgccatgggaagtcattgagcagaaaacgaaggaaatacttgatcagggtatggagtcagacggcttcattttcaatcttggccatggggtatttcctgatgtcagtcccgaggttttgaaaaaactgacagcatttgtccatgaatattcacaaaacaaaaaaatgggtcaatattcctaagcatatcttttggtatcttaatgatatcctgtcaaaatgtttgtatcagatcattaaagagggtgtaaacagtgagtagaaagaaaatggggcttctcgtgatggcgtacggcacgccttataaggaagaagatattgaacgttattatacacatatcagaagaggcagaaagcctgaacctgaaatgcttcaagatttgaaagacagatacgaagcgattggcggcatttcaccgcttgcccaaatcacagaacagcaggcgcataatctggaacagcacttgaatgaaattcaggatgagattatgtttaaagcgtatatcggactgaagcatatcgagccgtttattgaagacgccgtagcagagatgcataaggatggcattacagaagcagtcagcatcgtgctggcgccgcatttctccacgttcagcgttcagtcctacaacaaacgcgccaaagaagaggctgaaaaactcggcggcttaacgattacgtcagttgaaagctggtacgatgaaccgaagttcgtgaaatattgggttgaccgagtgaaggaaacatatgcgtcaatgcctgaggatgaaagagaaaacgcaatgctcatcgtatccgcacacagcctgccggaaaaaatcaaagaatttggagacccgtacccggaccagcttcatgaatcggcgaaattaattgctgaaggcgcaggcgtttccgaatatgctgtcggctggcaaagtgaagggaacacgcctgatccttggctcggacccgatgttcaggatttaacacgtgatttattcgaacaaaaaggctatcaagcatttgtatatgttcctgttgggtttgtcgcggatcacttagaagtgctttatgataatgattatgaatgcaaagtggttactgacgatatcggcgcaagctattaccggccggaaatgccaaatgccaagcctgaatttattgatgctttggcaacagtcgtattaaaaaaattaggacgttaaagaaggcgatgaacatgagtgacggcaaaaaacatgtagtcatcatcggcggcggcattaccggtttagccgccgccttctatatggaaaaagaaatcaaagaaaagaatctgccgcttgagctgacacttgttgaggcaagtccgagagtcggcgggaaaatccagactgtcaagaaagacggctatatcatcgaaagagggccagactcatttctggaacgaaagaaaagcgccccgcagcttgttaaagacttaggtcttgagcatttgcttgtcaacaatgcgaccggacaatcctatgtgcttgtaaaccgcaccctgcatccaatgccgaagggcgctgtaatggggataccgacaaaaattgcgccgtttgtttctacgggtctgttttctttgtctgggaaggccagagctgcaatggatttcatcctgcctgcgagcaaaacaaaggatgatcagtcattgggagaattcttccgcagacgtgtcggagatgaagtggtcgagaacttaatcgagccgcttctatcagggatctacgcaggcgacattgacaagctcagcctgatgtcgacatttccgcaattttaccagacggaacaaaagcatagaagcctgattctcggcatgaaaaaaacaaggcctcaaggctcaggccagcagctgacggcaaaaaaacaagggcagttccagactctgtcaaccggtttgcagacccttgtagaagagatcgaaaagcagttaaagctgacgaaggtgtataaaggcacaaaagtgaccaaactcagccatagcggctctggctattcgctcgaactggataacggcgtcacacttgatgctgattcagtaattgtgactgctccgcataaagcggctgcgggaatgctttctgagcttcctgccatttctcatttgaaaaatatgcactccacatccgtggcaaacgtcgctttaggtttccctgaaggctccgtccaaatggagcatgagggcacgggttttgtcatttcaagaaacagtgactttgcgatcacagcctgtacgtggacgaataaaaaatggccgcacgcagcgccggaaggcaaaacgctgcttcgggcatatgtcggaaaagctggagacgaatccattgtcgatctatcagataatgacattatcaacattgtgttagaagacttaaagaaagtcatgaacataaacggcgagccggaaatgacatgtgtcacccgatggcatgaaagcatgccgcagtaccatgtcggccataagcagcgtatcaaggagctgcgtgaagcacttgcatctgcgtatccgggtgtttatatgacaggcgcttctttcgaaggtgtcggcattcccgactgcattgatcaaggaaaagctgccgtgtctgacgcgcttacctatttattcagctaaaacctccgctttatcgcggaggtttttttgatgtgcaatggcaatattgtgtaaaaaaatgattgaattgaacggcaggttatgatacatttgcatatgtacttaatgactaaaatgttcaaacggtcagtttcgaggtgaatacaatgtcaatagatcgaaaaaagctcattttggaggcggctacaaagtctttcacgcagttcgggtataaagcgacgacaatggatcttgtcgcaaaacttgcgaacgtggggaagggaaccatttatacttttttcaaaaacaaagaagagctgtttgacgagattttcactactttattaaaggaaatgaaacaaaaagcggatgaagcgatggagccgaaccttccgttccatgaaaatgtgcacagagcgctgtttgccattctggagttcaggaaaacacatcagctgacgattaaaattttccaagagaatgccgagattggtacaatggctgttcaggaagtgatccagaaaatggagcgagccatactgtcttatatcaaaagtaagattgaagacgggatcaaaagcggcgcaatcaagccgtgcgaccctgaactgacagcctttgtgatgctgaagctttatatcgcgctcatttttgactgggaaaaacaacaccccccgcttgataaagagacaattgcgggactgcttgaattgtatgttgtcaaaggattgtcagcgaactagataatcctttctctttgcaagaaaatgaccatttttcatgatgagtcagttttagaatggaggcatcaggatgaacacaatacgaagtcagtggaaagacatcgtaacaagtaaaaaattattgattcccatcatcgccattttgtttgtcccgcttatttacagcggcgtattcttaaaggcttattgggacccgtacggcacagttgaccagctgcctgtcgttgtcgtcaaccaagacaagggagcaacgtatgaaggagaaaaacttcaaatcggtgatgatctggtcaaagaattaaaggataataacaactttgattggcatttttccaatgatctcgaccaatcgttaaaggacttattgaatcaaaaatattatttagttgtcgagattcctgaggatttttctaagaatgccagcactgtattagacaaaaatccgaaaaaattggatctgaaataccatacaaatgcaggttctaactatgtaggggcaacgatcggcgaaaaagcgattgataaactgaaagcctctgtttcaaaagaagtgaccgagcaatatacgaaagttatttttgataactttaaagatatcgcaaaaggtttgagcgacgcgagcagcggcgcgaaaaaaattgatgacggcacaaaggatgcgaaaaacggaagcgcccagctgaaagaaaatctggcgaagctgaaggaaagcaccgctaccatcagtgacaaaacagcgcagcttgcagatggagcggctcaggtgacgagcggcatccaatcgcttgacagctcgctcggtaaattccaggacagcagcaaccagatttatgataaatctggccagcttgcagcaggatcaggcaagataacgggcaagctgaatgaactgaatgccggccttcaaaaggtgcagcagggcttgcctaatctgacaaacgggctggatcagctaaacagtaaagcgcaagaaggttctgagaaagcatcaaaagcggaaaaacttataaatgcgctcgatttaacgaagcttgaaacagctgtgaataacctcgaaaagtcagaaacagcgatgaatgaatttaaaaaacagctgtctgactttgaaaacagcttaaaaaaccgtgatcaggcatttaaaaatatcatcaactccagtgatttcttaacagcggagcaaaagagccagctgatcagctctgttgaaaagcagcttccgaaagttgatgcgcctgattttgatgaaattttaagtgggcttccttcagctgatcagctgcctgacatcgcaacgataaaaagctcattggaagatgtgaaagcgcaggttgcccaggtgaaggcattgccggaagctacctctaaactttataacggcgcaaaagccactcaagacgcgattgacaaattaactgctggatctgagaaattatacaatgcgtcacagcaggtgacagatggccaaactaaactgacagccggcatcggtgaatataataagcagttcgcaaaggcaaaagcgggctcagagcaattggtgacaggaagcagccaagtatccggcggattgtttaagctgttagacgggtctaaacaggtccaaagcggatcatcaaaacttgcagacggatctgcatcacttgatacaggtttaggcaagctgttggacggcacaggagagctgtctagtaagctgaaggatgcggctgaccaaacaggagatatcgatgctgatgatcaaacatacggcatgtttgcggatccggttaaaaccaaagatgatgccattcattccgttcctaactatggaacagggctgacaccttatatcctgtcaatgggcttatatgtcggcggcatcatgctgacggttgtcttcccgctgaaggaagcgtcagggcgtccgagaaatggttttgagtggttcttcagcaaattcaatgtcatgatgcttgtaggaatcattcaatcattgattgtggcgacggttcttctattgggaattggtctcgaggtagagagcacgtggagattttacgtgtttacgatcattacgagtctagcttttctagcgataattcaatttttggctacaacgatgggcaacccgggacgatttatcgcagtcattattttagtgctgcagctgggagcgagcggaggaaccttcccgttggaattgcttccgcatttctatcaggtcatccatggcgcattgccgatgacctacagcattaacggattcagagcagtcatttcaaacggtgactttggctacatgtggcagatggccggcgtcttaatcggcatcgccctcgtcatgattgcactaagcattacttactttacaatgttaagccggaaggaagaaacatcagaagaacagccggcttcataaagaaaaagaacttgtttccttggaaacaagttctttttttgttacattccccatttaataagcaatcctgtataggttaatccgccgccaaacccgaaaagcaaaacgatttgatcttttttcagcttcccggctttcactgcgagatcaagcgccaaaacaattgaaaccgaagatgtgtttccgtagtgctcaacactagtgagcgttttttcaatcgggaacggtgttttttcacaaattgactcgatcatgcgcaagttcgcgctgtgaggaacaaaccaatcgagatcatcagagctgagtcctgctttatgtaaaagccgttcaaattcgccagggacagttcttgcggcccatttatatacctcgcgtccgttttgcaccatttttccagaaccgacaagctgcacaccgtttatttcatttcgcagtccggcacgatacaaaatatcgccgccgttcccgcttgttccttgtacagacgcaagaaatcccggcgtttcttcatctcgttctactaacagcgcacccgcggcatcgccgaacagtacgcatgtcgttcgatcggtataatcggttacctttgataacgtctctccggcgatgacgagaattttttgatgaaggccagatgtgatcaatccatttgccaaatggaggccgtatgtcagcccggcgcatgtcgcattaatatccagcgcgccggtgctttcccagccgaaatattcctgtacgcggcatgccgtactcggaaaggcgtaatcggatgtggttgtggcaacgaggatcatatcgacatcatcaagcgttcctttataacggctcttgagattcttcaccgcttctatgcataaatcagaggtaaattgatgttcatccgcaatccggcgttctctcattcctgtgcgctgaacgatccattcatcagaggtatcaacgatcttttctaaatctgcattggttaaacgtctgctcggcgcataggtgccgatagctgtaatttttgcttttgacatatgaatcactccttatggtcagattataacactagatattagtatctggtactaaaaagaaggtttttttacaaaaaaagagaagtgtagataggaatctatgaaaaagaaaaaggaggctgaaaaatggtcagtcaagaagcagtagtctttttggcattatccggggctattgcgtttctgttgccaatcgggctgattgtatggtttaagcgaaagtatggtgcctcgcttaaagtgttttttattggcgctctcacgttttttgtcttcgctcagctgctggaaggcggcgttcatgtttatgtactgcaagtgaatgaaatgacgaaagaagcgatgcagcatccattatggtatggcatttacggctgcttgatggccggaatttttgaggagtgcggaaggtatatgatgatgcgattttttatgaagcgccatcatacttgggcggatggtctggctttcggggcaggccatggcgggcttgaagccatcctgattacaggcttgtcctctatctcacttattgtatacgcatttgcaatcaatagcgggacgtttgaacagcttttggtcaatggcgacgtcaaacaggcgcttttgccgatacaggagcagctgctgcatactccttcgtatgaatggatgctgggcggaatagaaagaatcagtgccattgccgtccaaattgggctgtctctgcttgttttgtacgcggttaaaagccgccggccgctgtttttgttgtattctattcttttacatgcactgtttaatgtaccggcggttttatatcagagaggaatcatagagcatgctgctgctgttgaaatcattgttgctcttatagcggctttatcagtttattggattgtaaaagcaaaaagggtgtttcaataaaaggtccaagcagcagcaatgcccgcttggaaaaatgtgaatggaaatattcattaagcgtgggtcatcagaatatttctgattcagtctttagcaatgacagcaagaatgtctgtgttttttacaagagaaacaatggtgtttctttttcttcttctcgcaagggtcatggcattctttctttttcttgcaatggtcgtggaaatctttatcgaaccactcgtcaaagaaccaaaaatcatcgaaccaatcgtgacaacgacatttctgttcatgtgaatgacgacagcacatagaaatccctcctcttcccatgctctctacagcatatgagagattgataggaaaagattggacgggtccctcgggaaaagagtatattttaagtagaaaataaaaggaggaatgccctatgacgtccgtacgtaaaacgatggagctcattaaagaacttgtatcgatcccaagcccgaccggaaatacatatgaggtgatcaattatattgaaagccttttaaaagaatggaaggtagaaacggttcggaaccacaagggcggcttaattgcaacgcttccaggacgcgacacatcccggcatcgcatgctgactgcgcacgttgacaccctcggcgctatggtgaaggaaattaaagcggacggccggctgaaaatcgatttaatcggcgggttccgctacaactcgattgagggagagtattgccaaattgaaaccgcctcaggaaaaacgtacacaggcacaatcttaatgcatcaaacgtctgtgcacgtatacaaagacgcgggaaaggctgagcggaatcaagagaatatggagatccgcctagatgaacctgttcactgccggaaagatacggaggagcttggcattggcgtcggagactttgtgtcgtttgatccacgtgtcgagatcacatcaagcggatttattaaatcgcgccatttggatgacaaagcaagcgtcgccttattgctccgcttaattcatgaaattcaaacagaagacattgagctgccgtatacaacccattttcttatttccaataatgaagaaatcggttacggcgggaattcgaatattcctcctgaaacagttgaatatttggcggttgatatgggcgctatcggtgacgggcaggcgacagatgaatattcagtatcaatctgtgtgaaggatgcgagcgggccgtatcattatcagctcagaaagcatttagttcaattagccgagaagcatcatattgactataagcttgatatatatccgtactacgggtctgatgcgtcagcagcgatcaaatccgggcatgatattgtgcatggcctcatagggccgggaattgacgcttcccatgcatttgaacgcacccataaatcatctcttcgccataccgctaagcttctgtattactatgtacagtcaccaatggtataagggggaggaccaatgaagatttataagctgaaaagcacattcggttgggaaggtgatgacgggttgggagaacagctgattcagcagatccttgccggagaaaaaaacgccacgtgcgcgccgaaatcattgtattcaaaagatgaattgagggacgtttatcaaacagcgggtcagcttgttaccgtttatgataaacatgacaatccaagatgcaatataaaagtaacagatgtctttgaaaccacctttggtgcgcctgatatgaggttagtcaaaggagagggcaatggagaccgaattgaggagtttcaagaggatcatcggatggcatgggcggaactgatcaaaagcggtgaactggagctgaatgaggatactgttttgattacagagttgtttgtgcttgttaaagattaaaaaagcctgcggggcaagaaccccgcaggcttttcattaaccagaaatggttgcgttttgttctgttttcgattgggacataacagtttctgctttcgcaggattaaacatgccttcccatttagacatcacaacggcagcaagcgcgttaccagtcaggttgacaactgtacgtgccatatccatgatgcggtctacgccggcaataaaggcaagtccttcagccggaacgccgatggtgccaagcgttgcaagcaagacaacaaaagaagtaccaggcacggcagccatccctttagatgtcaccattaagacgagcacaagcgtaatttggtgccaaatcgtcaaatcaatgccatatacctgtgctaaaaagagtgcggcaatagattgatagagaacggaaccgtctaagttaaacgtgtaaccgatcggaatgacaaatgaaacaatgccttttggacatccgattttctccattttttccatgatacgaggaagaaccgtttcagagctggacgtactgaacgccagtaagatttcgtccttcatgtaagcaaggaacttgaagatgctgatgccggcaatttttgcgacaatcccgaaaataacaattaagaagaaagcaagcgcgacataaaccaatccgacaagctttccgagagagataagagaaccgagtccgaatttagacacagtcactccgataagagcgaaaacgccgaatggcgccactttcatcacaaggtttacaacgtggaacatggcatgggatacaccttcaaaaaaggctaatacaggcttgcctctttcaccgatcgcggaaatacccaatgcaaatagtactgtaaagcagatgatggctagaagatccccttcgaccaatgactggaagaagtttgtcggcacaatatggaggaacgtttccgccactgatttattactttgttctttttcagtttcaacatattgactgatgtccgatttttgagcttcgtgtatattaactcctgtacccggatggaagatgtttgcaagggctagtccgagaataatggcaaaagtcgtgatgatctcgaagtacagaatcgttctgaagcctaatttaccgacttgctttccatttcctgcaccggctacaccgatgattaagctggagacaacaataggaatcactatcattttgattaagcgtaaaaagagatccccgattggctgcaggtaagtaggcaatgctgggttgccataccaaatgacgccaacaatgacacctagaataagtccaacgaatatttgtgtggctaatccaaacttaattcttttcatagattacctcccaaaaaacaaagtatcaacatatatcatgaatagacatatatttaatctcactattagatcaaattataatagataagaaatcaattcgtctatagtaaattatatttcgaaaataaagaatattcaatgacattatgataatcaccagaattatctaaaaacaggtgagctttgacctaacctgactattatttcaaaattaagagatatgtgaaaaaataagaaaatcccacgcgtaaggcgcgggattttcgctcattacaaatcgtttacttttatacagtcattgcagatattaccataacactcatgctgctcttctatcttttttccgcattccgcacactttttcgaaggcaggtttctaaaaaattctgtgattttccccagcataaccaatccctctttcccctttgtagtgatttcattgtaatataacagatcgcaaaaatcaataactgttttgatacaatgtttaaaacatgcttttttcaagaaaaatgggtatattgaaggaggatcaattttttttgaaaagataggaggacattatgaaagttacagttatcggatgctatggcggttttccggccgcaaatgaagcgacgtcaggctatttgtttcagtcaggtgattactctctgcttgttgattgcggcagtgccgttttgtctaagctgttcggatatgtgccggcggaaaagctggatgcggtcgttctgtctcattatcaccatgaccatatcgctgatatcgggccgctgcaatttgccaagcaagtcggttcgtttctcggcaaaggagagcatacgcttccgatttacggacatgatgctgatatagaacagtttcaaaagcttacatataaaacacatacaaaagggatcgcctatcagccggatcagccgttgactgccggtccgtttacgatcacctttttaaaaacgattcacccggtgacgtgctatgccatgcggattactgacggcagccacactgtcgtttatactgctgattccagctatcaggattcatttataccgttttcgaaagatgctgatttattgatctcagaatgcaatttttatgccgatcaagacggaacaagtgcaggccatatgaacagcctggaagccggacgcattgcaaaagaagccggagcgggagaactgctgctgacacatttgccgcattttggcgtgcatgacaatcttcgcaaagaagcgaaaaccgtttttaacggagaagtgaatattgcgaaatcaggttttgtgtgggaaggataaaggaggagcaccatgttatttatagacaatcaaaatatcaatgatccgcggatcaatcttgctatcgaggagtactgcgtaaagcatttagaccctgaacagcaatatttgctcttttatgtgaatcaaccgtctattatcattgggaaaaaccaaaatacaatagaagaaatcaatacaaaatatgtagaggaaaacgggattatcgtcgtccgccgtttatcaggcgggggcgctgtgtaccatgatctggggaacttgaacttcagctttattaccaaggatgacggggacagctttcataactttaaaaaattcactgagccggtgattcaggcgttacatcagcttggggttgaagctgaattaagcggccggaacgacattgtagtggatggccggaaaatatccggaaacgctcagtttgcaacgaaaggccgtattttcagccacggcaccctcatgtttgattcagccattgatcatgttgtatcagcattaaaggtgaaaaaggataaaattgaatcaaaaggcatcaaatcgatcagaagccgagtagcaaacatcagtgagtttctcgatgataaaatgaccaccgaagaattccgcagccatttgcttcgccatatttttaacacaaacgacattggaaacgtgccggagtataagctgacggaaaaagattgggagaccattcatcaaatttcgaaagagcgctatcagaattgggattggaactacggccgctcgccgaaatttaaccttaatcattcgaaacgttatccggttggatcgatcgatttgcgcctagaggtcaagacaggcaaaatcgaggactgcaaaatcttcggagatttcttcggtgtcggtgatgtatctgaaattgaaaacctgctggtcggaaaacaatacgaacgcagcgtcatcgctgatgtgctcgaaggtgtgaatctcaagcattactttgggaacattacgaaagaggatttccttgatctgatttattaaggcaaaacacatcgtttgaaagagcggttgtgtttttgaaataatggaggcaggagggattcacatgaaagtgtttttaatcggagcgaacggacaaatcgggcaaagactcgtctctttattccaagataatcctgatcattccatcagagcgatggtcagaaaagaagaacagaaagcgtctcttgaagctgccggtgcagaagctgtgcttgcgaatctggagggcagcccggaagaaatcgccgctgcggcaaaaggctgtgacgcgatcattttcacagccggttccggtggcagcacaggctatgataaaacactgctggtggatctcgatggagcggcgaaagccattgaagctgcggacattgccggaatcaaacggtttattatggtcagcgccctgcaagcccataaccgtgaaaattggaatgaggcactcaagccttattatgtggccaagcattatgctgataaaattctggaagcgagcggtttaacctatacgattatccgtccgggaggccttcgcaatgagcctggaacgggaactgtttcagcagcgaaggatctggagcggggatttatttcccgtgatgacgttgcaaaaacggtcattgcctctttagatgagaagaatacggaaaatcgggcctttgatctgacagaaggagatatgccgattgccgaagcattgaagaaactatgacagtactgacactcagggctttttgctcttgagtgtttttttctgtttctctataatggaggagaaagcttggcttcaataatgaatgactattcattcactttaaggggtgggagaatgaatcttgtttcaaaattggaagaaacagcatctgagaagcccgacagcatcgcatgcaggtttaaagatcacatgatgacgtatcaagagctgaatgaatatattcagcgatttgcggacggccttcaggaagccggtatggagaaaggggaccatctagctttgctgcttggcaattcgcctgattttatcatcgcgttttttggcgctttaaaagctgggatcgtggttgttcccatcaatccgttgtacacgccgacagaaattggttatatgctgacaaatggtgatgtaaaggcaatcgtgggcgttagccagcttttgccgctttatgagagcatgcatgaatcgctgccaaaggttgagctcgtcattttatgccagacgggggaggccgagccggaagcggcggatccagaggtcaggatgaaaatgacaacgtttgcaaaaatattgcggccgacatctgtcgctaaacaaaatcaagaacttgtccctgatgataccgcggttattttatatacgtcaggaacgactggaaaaccgaaaggcgcgatgctgactcatcagaatttgtacagcaatgccaacgatgttgcaggctatttgggaatggatgagagggacaatgtggtctgcgctcttcccatgtttcacgtgttttgtttaaccgtctgcatgaatgcaccgctgatgagcggcgcaactgtcttgattgagcctcaattcagtccggcatctgtttttaagcttgttaagcagcagcaggcgaccatttttgccggtgtgcctacaatgtataactacttgtttcagcatgaaaacggaaagaaagatgatttttcttccatccggctgtgcatttcgggaggcgcggccatgccagtcgcgttgctgacggcgtttgaagaaaaattcggtgttaccattttggaaggctacgggctctcggaagcatcacccgtcacgtgctttaacccatttgacaggggcagaaaaccgggctccatcgggacaagtatcttacatgtcgaaaacaaggtcgtagatccgctcggacgcgagctgcccgctcaccaggtcggcgaattgatcgtgaaaggccccaatgtgatgaagggctattataaaatgccgatggaaacagagcatgcattaaaagacgggtggctttatacgggggacttggcaagacgggatgaggacggctatttttacattgttgaccggaaaaaagacatgatcattgtaggaggatacaatgtgtatccgcgggaggtagaggaggtgctgtacagccatccggacgtcaaggaggcggttgtcatcggcgtgccggacccccaaagcggggaagcggtaaagggatatgtggtgccgaaacgctctggggtaacagaggaggacatcatgcagcactgtgaaaagcatctggcaaaatacaagcggcctgccgccattacgtttcttgacgatattccgaaaaatgcgacggggaaaatgctcagacgggcactgagagatattttgccccaataaaatgaaaaagcgaagcggttagcttcgctttttcattttcaatcctttgcttcttttttaataatatttagcagcgcctttgtatcatttttgcttaatttgtagtatgtgccatccttcaaaaaaacggcttgctggctgccgtcaatccatagtctgaatgagtcataccggtctttatgaaacttgattgtcccttcgtaatcaggggctgatgttttttctgtcttcacctgttttccctgattcataatatccagcatatctttgacgtgctgtcttttttcaatctcgatatcttcctggccgcttgaagacagtgtgatcaaatccgcgtctaccgattgatacacatcgcctgatcggctgtaaagataaaaaaatgcgataaacacaagaccgattaccacgatggctgccactatttttttcatttgcatcactccaaacattgttagttttcccagcgatcgggctttccatgcttaaaagggtggaaaagtgcggaacacagcttggttctaagaatttgaatttatgattacaatagaagtaacgggttgatgtgaggagtgaggcgttatgcgcaagtggattgcggcagcaggacttgcttacgtgctgtacgggctgtttttttattggtattttttcctgtcgggtgattccgcaataccggaagccgtgaaagggacgcaggctgatccggcttctttcatgaagccgtctgagttggcagtggccgagcagtattcgaatgtcaagaattttttattttttatcggggtaccacttgattggtttctgttttttgttctgcttgtcagcggtgtttcaaagaaaatcaagaaatggatcgaagcggccgtgccttttcggtttttgcagaccgttggttttgtgtttgtgctttcgctgattacaacattggtgacgctgcctttagattggataggctatcaagtatcgcttgactataacatttccacacagacaacggccagctgggctaaggatcaggttatcagcttttggatcagctttccaatctttacgctttgcgttctcgttttttattggctgatcaaaaggcatgaaaaaaaatggtggttatacgcctggctgttaacagtgccgttttcgctgtttctgttttttattcagccggtcattatcgatcctttatacaatgatttttatccgctgaaaaacaaagagcttgaaagcaaaattttagagctggcagatgaagccaatattccggctgaccatgtatatgaagtgaacatgtcagaaaaaacaaatgcgctgaatgcctatgttacaggaattggggccaataaacggattgtattgtgggatacgacgctgaacaaacttgacgattcagaaatcctgtttattatgggccatgaaatgggccattatgtcatgaagcacgtttacatcggtctggctggttatttgctcgtgtcgctcgccggattttatgtcattgataagctttacaagcggacggttcgcctaacccgcagcatgtttcatttagaaggacggcatgatcttgcggcacttccgctgttattgcttttgttttctgttttgagctttgcggtgacgcctttttctaatgctgtctcgcgttatcaggagaataaggctgaccagtatgggatcgagttgacagagaacagagaagccgctgttaaaacgtttcaggatttggccgtgacggggctgagccaggttgatcctccggtgcttgtgaagattttcagaggcagccatccttcgatcatggaacggattcaacatgcggagaaagaagagaatgcgccggaacatcaggatgctgacaaataaaaagaagcaggtatggaggaacctgcttctttttactattattgtgcagctgcttgtacgttgattaacccttttccatagtagaaagagtttccaagatatgttgcagtgctttctaaacgatcacggacttgcgcgtttgtccaagtcgggtgcttagaaagaattagcgctgctgctccggcaacgtgaggagtcgccatggacgtgccgttgtaagcaccgtaagtgcctccaggaagtgtgctttggatggatacgccaggagccatcacatcaagctcagaacctgcgcttgagaatgaagctctttggttgctgctgtttaccgcacctaccgcaatagtagaaggatattttgcagggtagccgactgtgcttgagcttccggacgaaccttcgtttccggcagcggcagcaacgacgataccgctggaaacggctttatcaacgactgttttcagcgctgtagaaccagaaggtccgccaaggctcatgttaataacatccatattgttggaaatggcccattcaatgccgttaataatccagctatattggccgcttcctgttgaatcaagcacttttactgcatataatgatgcgcttggcgctacgcccagaacaccgattgagttattaagagcggcaatcgtaccggctacatgcgtaccgtgagaactgccgtcctggtatgggtttgtttcagaaggtacgaagcttgctccgcctctgacgtttaagtcaggatgagaagagtcaattccgctgtcgataacagctacttttacgttagagcctgtgtagccttgagagtgaagagccggcgctttaatttgagaaatgccataaggaacagattgcgcatattcatgtgcaatatgatcttcttccacatatgcaacgctcggatcttttttcaattcttttacagctttttcatccaatgttgctgcggccgcgttaacatacttaaattgcttttgaacctttccgcctttttcagaaataacatcctttttcttggcggaactcatggcactcattgtctgtttaaatccgacaatgtatttcttttctgtactgctttttccggcagcctgcgcagacatgttgctgaacgccatcgtaaagattaacgttaacgcaaacaacaagctgatccacaattttttgcttctcactctttaccctctccttttaaaaaaaattcagagtagacttacttaaaagactattctgtgaatttattgtaatagatggaataatattttagtagacccatttttttgagatgattttatctctatttaggtatatcatctctcgctatttccgtagagactcgaaataactattttcatacagaaaagaacgaaaatagacatgagtaaatgttcattatgctgaaatgtcatgcttttttaggttaaatgctcctgagtcccggcaaatttctgtcgaaaaaattcgttcaaatgacctgcgtgtgcttccgtgagaacaatggatattatcgtgatattttttcaaagcatgatgataaaagtattctgaaaaataaactttacagaaaagggatagaatgaaaaaattattgagagggaggaagaaataagatgaacattcgccaagcaaagacatcagatacggccgccattgcgccgttgtttaaccaatatcgggaattttatagacaggcatccgatttgcaaggggcagaggcttttttgaaagctcgtttggaaaatcacgagtctgttattttgatagcagaagaaaatggagaattcataggctttacccagctctatccaacgttttcttctgtgtcaatgaaaaggatatacatattaaatgacttatttgtcgttcctcatgcacgtacaaagggagccggctgccggctgctttctgccgcaaaggattatgcagaggaaaacggggcaaaatgtttaacacttcagactgagcaccacaaccggaaggcaagaagcttgtatgagcaaaacggctatgaagaggataccggatttgtccattattgtctcaatgtgccggcgaagtgaaaatggcggcttgatgatttggttttttgaacgttcttcggttacgatataaatgaaaaggagtgtgccgaatgtcaacgttatttcaagccttgcaggcagaaaaaaatgccgatgatgtttcagtccatgtgaaaaccatatcaacagaggatttgccgaaggatggtgtcctgattaaagttgcttattccggcattaattacaaagatggtctggccggaaaagcaggaggcaatatcgtcagagagtatccgcttattttaggcattgatgctgcgggtacggtcgtctcttccaatgatccgcgttttgcggagggggatgaggtgatcgcgacaagctatgagctcggtgtctcccgtgatggcggattaagtgaatacgcttcggtgcctggtgactggctggtgcctttgccacagaatctttcgttaaaagaagcgatggtgtacggaacggcgggatttactgcggcgttatcagtgcatcggcttgaacagaacggtctgtctccggaaaaaggcagcgtgctagtcacaggagcaaccggcggtgtcggcggaattgcggtatcgatgctgaacaagcggggttatgatgtggtggcaagtaccggaaaccgggaggcggctgattatttgaaacagcttggtgcaagcgaagtaatcagcagggaagatgtctatgacggaacgcttaaggcgctgtccaagcagcaatggcagggagcggttgatccagtcggcggaaaacagcttgcctcgcttttaagcaaaattcaatacggcggatctgtcgcagtgagcggcttaaccggcggaggagaagttccggcaaccgtgtatccttttattcttcgcggagtaagcctgctcggaatcgattcagtatattgtccgatggacgtcagagccgctgtttgggagcgcatgtcttctgatctcaagcctgatcagctgctgaccatcgtggacagggaagtatcattggaagaaacgccgggtgcgttaaaagatattttgcaaaatcgcattcaaggaagagtgattgtgaagctttaacaggatcagcttgcagagaatgttatttttctgcaagcttttttgtggacaggatgatcagctgctgaactgctgtgtcgcgaaacaagattttcctgtaagccgaactttctcttctcattttaaaaataattggtgataatgattctcattccgtgttatactactcttggacatcttaaccatagaaactaccaacaggagagactggaacatatgaaaaaaacactgattattcttacagttttacttctttctgtcttaacggctgcttgctcgtcttcaagcggcaatcaaaacagtaaagaacataaagtggcggtaacacatgatttagggaagacaaatgtgcctgagcatccgaagcgggttgttgttcttgagctaggttttattgatacactgcttgatctcggcattacgcctgtcggggttgccgatgacaacaaagcgaagcagctgatcaacaaggatgtgctgaagaaaattgacggctacacatctgtcggcactcgctcacagccaagcatggaaaaaatcgcttcattaaaacccgatttaattattgctgacacgacccggcataagaaggtgtacgatcagctgaaaaaaatagcgccgacgattgcacttaataatttaaatgctgattatcaggatacaattgacgcttcgcttacgattgcaaaagcagtcggcaaggagaaggaaatggagaaaaagctgacggcgcatgaagaaaagcttagcgagacaaagcagaaaatcagcgcgaacagccagtccgtgcttttgatcggaaatacaaatgataccattatggccagggatgaaaacttctttacatcgagacttttaacacaggtcggctaccgatatgcaatcagtacgtcaggcaatagcgattcaagcaatggcggcgactctgtgaatatgaaaatgacactggagcagctgctgaaaacagatccggatgtgatcatcctgatgacaggaaaaacagatgacctcgacgccgacggtaaacgcccgatcgaaaagaatgtcctttggaaaaaactgaaggcagtgaaaaacgggcatgtataccacgtggatcgtgcggtgtggtctctgcgccgcagtgtagacggggcgaatgccattttggacgagcttcaaaaagagatgccggctgctaagaaataaaagaaaagacaggcaaacgcctgtctttttcttatttgataaagccggataagtggctgttgatattatagtcttttatccgccatttttcttctgcaaattcaatgttgctgaggcaggcgttgacgagacgggtgctttgaagctccgggtcaccgccggatatttctgtcagcagggcgtgaattgccgcaccgtgcgccacgatcagcaccttcttgtttggatacgcctgattcacttttgccaaaccgcccatcagcctgtcagtgagttcttctaaggtttccatattcggatagatgttatctggatagcgctttgtccgttcctccagcggcatgccctccgcgtcgccgtaatcgcgttccttaaaatcatccatctcgactatcggaagatgcagatattcattaataatttccgcggttcttttcgctcttttcagcgggctcgtcacaataatatcccaagaaaagtcctttacatattctccggtttctcttgcttggcgttcacctgttgcgtttagcgggatatcggttttgccttggcatttttgctgcaggttccaatcggtttctccatgtcttactaaacaaacggctgtcataaaatccccttcctgactttattcatatcgctattatactaaatcgaaagcgtgtgtcctatgaaaaagcctatgcaagaacttcaaataataaagcaagtccaattccgccgccgcttccgatggctgcaaccacatattgacagtctgtccgtcttttcgcttcataaaacaatctggttaccagagctgcacctgatgcaccgtacggatggccaagagctaaggcgccgccgcgcacattgatttttgaaaagggaatgccgagttcttgcgagcagacacaaattttgacggcaaaggcttcattgatttcaaataaaccgatatcctcaggtgttacatcgtgtgtatgtaagaggttacggatcgcatcaaccggtgccgcgggcggatagttggggtgaatcccactgactgcgctgccgataaaccggagcacaggcttaagtcccagggctgccgctttttcttcttccattaccaaaagagccgctgctccgtctgctatgccgctgctgttggctgctgtgactgttccggagctggtgtcgaaaaccggctttgcacggggaataatcgcttctattggccgcgttttcaaaaatgcttcgtccgtctccaattccccgagaggaacaatttcttcacggtaaaatcctccatcatgcgcgttcctgctgcgttgatggctgagaagggcgtactcatcctgcatgcttctgctgatggaatagcgtgcagccgtatattctgccgcaatgcccatgtctggatcgccgatggcatctggagaaaagcgggcccgttctgaaaaaggggattggctgctgctttctgagccgcccgcgatatacatcgtgccggctcccgcttgaataaggctgcaggcatagcgcacagcttcaaggccggagccgcactgtctgtcaattgtcattccgggaactgataaaggcagtccggcttgaagggctgacagtctggcgaggttgccgcctctgccggtagcgtttccgagaatgacctcgtcaacttgatcctctagctttcggctgagacagcggatgatgggagctgacaaatcctccggcaggaagggcttcagcagtccgttttgatttccaaagatcgttcgttttgcatcaacaataaccgcattcatttatactgtatactctcttccagccattttttcactctggaacgggcaatttttccgctgctcgtttccggcaagctgtctgcaaacacccattttttcggaattttataggaggctaatttctgtttacacaaggctttcagtgttctggcattagcgtttccatgaatgacagctacagcgatttctccccaatactcgtcgggaatgccaacgacagccgcgctttcaacctctgggcaggcgagaagcacacgttcaatttcttctgggaaaatatttaatcctccgtacacgatcatcccgttttctcttcctgatatgtatagaaagccctcttcatcaacatagcccatatcatccactgtcatccattcatctggtgtgctgccgttcacatagccggaaaaccgcatcgggctgttgacaaatatttttccgacttcgcctggctgacagcgttctccttcagcgttgcggatttcgatccggacattatgaaaagggcggcccgctgaatgcggtttccgtttgctgtcttccggtgaagaaaacgtcacaaaactaagctctgatgtgccgtaaaaatcgtacagcttgagatgaggccatgcagcggcaagcttctccttggattctgccggccagtctgcgccggatgaaatgattttgacgggactgtcgggaaaaccctcaatccttgtgagggcgtctgtcatcgtcggtacggtatagagaacactgatggattcacggcacagccattccttcgctttggcaggagaaaactttttcagcaaacaaacggttcctccgagaaacaaagtgctgactgccccgtataagaagtgagaggacattaacgtcccgggaatcaataccgtgtcatttgatgtaattgaaaaatctgtttctgtacaggtaaagctctctatccatgagcggtgagatcgcgtgaaggccttcggttttcctgtcgagcccgacgtaaatcccatataaaaagggtgctccggatcaatggtaggcaagggatcagcggttgcttcagaaatatctgccatacagttatccagcaaaacaacaggtgtctggctatctgtcagtttgtttttgaaaaaggctaaagtaaccacaagatccgcattgcttatggacagccgctccttacattcagccgggctccagcgtgtgtcgatgggaatggctgtgcaaccagccgctgcggctccggcaaacagctgtaaaaacgccagactatttgggagcaggatcgccacacgattcggcatgctcggctgtgaccgcagccaatttgcggtttgagagacaagccgatcccaatcctggtacgtgatttgctccgattcagtctggatcgctacacggccgggcgatgtttcggcagtagatgaataggtatgagtaattgtcatgtagtgtcatcctccttttgtaaacatcgtatcagaaagagacaaggcttgagtgatttttatcgccagaaatgcagatacagccgcttttatcaaatcaccaggcacatatgcaaggctcatgaaggcggcctgtgacaaatcaatatgcatgataaaagcttgtaccggtataccaagcagataaataaagatgatgccgaatacgatatgagtgaaaaagagacgcaatactgtcaccttccgcagcctgttagcggctaaactgatcagccatgaagcgaggggataagcaatcaaaaagcctgcgctcggtccgaaaaacacaccaaaaccgcctcgtccgccgggcaacagcggcgctccgaaggcgacgagcagcaaaaagacaagctggcttaagatagcagactttggcctgagaatgctgcctgccaacatgacaccaagcgtttgcaatgtaatcggaacgggtgtaaaggataagaagagagggggcataaagccgagcactgccatcagcgcggtgaaaatcgcaatatgcatcatgtcgattaatttcagcatgtgaaatcctccaaacagtaatcaaatatggttatacaataaatgccggtaattattatgtcaactgatttttgatttaagtttacataatgaacgcaaaaaaaccggccgtatggcagaccggtttttgatggttattcttctgtcaggatgacaagcgaatcaacggaagcggccacatgggaaacggcgcggctgacttcctgaagccctccaagaaaggcttgcagatcgacgtcgattttgcctgattgctctttgctgattttcatgctgtggacgatttcatcgaataagcggttaatttgcgtcattttttctttactttcgctgactagctcattcacgtctttgatatgcttggatacaatgttgatttgtgtattcgtattgttcacaagctcagaaacagtagagacggtttttttcgtgtcctcagaaagcttccgcacttcatttgccacgacagcaaagcctttgccgtgttctccggcgcgggcggattcaatagatgcattgagcgagagaaggtttgtttgttcagctatgcctgtgacgatgccgaagattttttcaatttgctgcgcgatttcatccagcttgaccatttctttttcgatttggacaaggcttgtgtcaattttgttcatctgtttttgctggacttctagctctttttttccgccgatcgacttttcttcaacagtgctggatgttacagtgccggctttggatgcttgagaaatgccttcagatttgtccacaagctcttgaactgatctgcttgtttctgaaaacagattggcaatcgatccagaggtttcttgaattttctgatgaagaaggtttttcttttcttcttgttcatcacgggtctggttgtactcgctttgaaacgcttcaaggacaagctgctgttctaagttcaagatttttgttgttgctttaatggcttttagcagttcttgctgatttgtaatggacgcttcataaatgtcaatcattgacaaaagaagctcttgaaacgcacccatataccattttggcaaaaggccgattcttaaatggatggaggcgattcggttacgcttttcaataaattcatcatcgataacgcctgcaaacatttcctgaatatgccgttttaacgtttgttttaagcggtcaactgagctgtgatcattaatgatatccatcaatgagctttcatggtcaaggtttttataaaacgcatcaacgatatttacgatattttcttgaatgagtggctgaagctgctctaacacgtaaagctcagcatctcccaacctgaccattttgagctgttttttgacatctgcatgtttgtttgtgagctgaatgcggtttttttgctgtccgtttgaatctgaaaagtaagctgtttcttgttttctgtcttttttaaataacaatacaatgatcccccttgggaaaaatataatttttactttttggctttttaagcctttttcttttttatcggccaagggaaacatgaatgaagctgcagatgaaaaatatttgaaaaaacgttcattaaaatgaacggtttaatcgagatctatttgttttaatggtttaatggccggaccctctacaacttcgccagatggcttaaagcgtgatccgtggcacggacaatcccacgtatgctcactgtcgttccactcgacctcgcagcctaaatgggtacaagtcgtatcaacgagatggaggcagcctgtctcatcacgaaatgctcccgctcgcctgccgtttatggtgacggctttcccttctcctggcgaaatgtcttcaaattggacatcaggcttttcaagctttccttttatcaaatgcttggcgacatctgcattgtaggaaatcactttctgcaacccgggattcagatggaaacgggacggcgtgaaaatgctttcgtatgggttttcttttttctccacaaggtctgacaataaagtggctgcgactgctgaggacgtcatgccccattttttgaacccggtcgctactagaatattgtcctcattttccgacatcggcccgataaacgggattttgtcgatcgtcactagatcttgggtggaccaataatatggaatgctttcgatgccgatggtgctttcggccagttgtctcagtgtttcataatgtgtagacatggcttttccctggcctgttttatggcttactccgctgaagagaatcagcttttcaccgtttacaaccgtatagcggagcgccactgacggctgatcgatactcaaatacatgccctcgggatactcgatcttcggcttgatggcaaggacataagatctgtcggagtacattctcgcagcatataatccgcctccgtcataaaaagggaagtgggaacagcatatgataaagcggctcttaatggcgtgccggctttttgttaccacttcgggcctttcgccttttttgatatcaagcgcaacggtctcttcataaattcggccgcctttttgaacaatttgctccagaagcgcttttaagtattgaagcggatgaaattgagcttgattcttcatgacaagcgccagcttagaacctaagggaattggaagatccttgataaggtctctttcaattccgagctttgtgtatgcctcatgctcggtgtggattttttgaacagcgttttcatttgccgtataaagatatgcgtcttgctcggtccattcacaatcaatttgatgttcatccacaatgccttttatgtaatcaattgcgttttggtttgcttcataataaagcctcgcatggtttaatccgaaatggcggataaattcgtcgtatatcatgtcatgctgtgcggtaactttagcagttgtatgcgcagtggttccgttaagaacctgatttgcttcaatcaaaacgacacggaagcctctcttcgtaagttcatatgccgttgtgattcccgtaatcccgcctccgataatggtgacgtcacattcagtgtcctcttgaagcgcaggaaaagaaggcaggtcagttgatgttttccagtatgtttcaggtgcttcctttgcaaaatgttgattagccaagccgttatacctccaatcagatttattcttaatttttccatattctatcttttcatacataggaagcaggcattgttcataacataataaggttgaaaaggagtgatttcattggcgaatcaaaaaaagaaaacattaccgcctcagcaccagaaccagcagcctggttttgaatatctgatggacccgcgtccggtttttgataagccgaagaaagcgaaaaaattagagggcaaaaccgctattattactggaggagacagcgggattggacgcgctgtctcggtgttattcgcaaaagaaggggctaatgtggtcattgtgtatttgaatgaacatcaggacgccgaggaaacaaagcagtatgtagaaaaggaaggggtaaaatgcctgctgattgcaggagatgtcggggatgaagcgttttgcaatgatgtggtcgggcaggcaagccaagtgtttccatccattgatatattggttaacaatgcagctgagcagcatgtccagcccagcattgaaaaaatcaccagccaccagctgatcagaaccttccaaacaaacattttttccatgttttacttaacaaaggcagtgctgcctcatttaaaaaaagggagctctattattaataccgcttcaattaccgcctataaaggcaataaaacgctgatcgattattcagcgacaaaaggcgcgatcgttacgtttacaaggtccctttcccagtcgcttgttcagcagggcatacgggtcaatgcagtggcaccgggtcccatttggacaccgcttatcccggccagctttgccgcaaaagacgtggaagtgtttggttcagacgtgccgatggaacgcccggggcagccggtcgaagtggcgccaagctatctataccttgccagcgacgattccacatacgtcacagggcagacgattcacgtcaatggcggaacaattgtgaacggataataaaaagccaatccttgaaggattggcttattcgctctgcttgagcgctgcatattctttagagagcgtaagaaacgcatctttatctttttcgtccaaggctttgttaatttggtccgtcagcatggcaagccgacggttatacaaggattcatcgagcaccatttgaatgtaaatatccgtcattgtgacatcgaattcttttgttttttgcgtgttgcgggacttcatgagctcagtgtacgattttttctctttcataaagaatccccccaatgccttttttatagtatatggataacggtcgaaaaaatcaataaatttttataatttttagacaactaatacttggcaatctatcgacatatcctgcaaaatgccgtaaaccggcaagtcttatgaaagtaaaatcggtttattactagtcatttagtaccgttaaatatcattaaaagatgattttatcttaaatgttaaaaaaacctgtcgttttacaaaaacagatgatagattattagtataaattttgcagaaaaaggatggaggccataatatgagtcagaaaacagacgcacctttagaatcgtatgaagtgaacggcgcaacaattgccgtgctgccagaagaaatagacggcaaaatctgttccagaattattgaaaaagattgcgtgttttatgtaaacatgaagccgctgcaaattgtcgacagaagctgccgattttttggatcaagctatgcgggaagaaaagcaggaacttatgaagtgacaaaaatttcacacaagccgccgatcatggtggacccttcgaaccaaatctttttattccctacactttcttcgacaagaccccaatgcggctggatttcccatgtgcatgtaaaagaattcaaagcgactgaattcgacgatacggaagtgacgttttcgaatgggaaaacgatggagctgccgatctcttataattcgttcgagaaccaggtatatcgaacagcgtggctcagaaccaaattccaagacagaatcgaccaccgcgtgccgaaaaggcaggaatttatgctgtacccgaaggaagagcggacgaagatgatttatgattttattttgcgtgagctcggggaacggtattagaaaaataggaaggagctgaccgaacagggcagctcctttcataaagctatgccgtcggaattcctccggtgatgccatatacctgagatgtcacatagcttgaattctctgaagctagaaatacataaacatcggccaattccactggctgcccagcgcgatttaatggagctggcggcgtgccttgtccgaatttcgggatgttttccgtcggctgtccgccggaaatttgcagcggtgtccaaattggtccgggcgcaactgaatttactctgatgcctttggaagcaagctgttttcccagtccgacggtaaagccgataatggcgtttttcgttgctgcgtaatctaacagcatcgggcttggattatagccttcaactgaggtagttgtaataattgaagctccctccggcaaatacggaagcgccgcttttacaacccagtaaagggaaaagacgttcacttcaaatgttttatagatttgttcagtaggcagatcttcgatgttttcgaccgcttgctgtttgcctgcaacgagcgctagcacatcaagtccgccgagttcgtgatgcgactgtttgactagatcttggcaaaaggattcgtcgctcaagtctccggggatcagcactgcttttcggccttctgcttcaatcagctcttttacctcttcagcatctggctgttcctcgggcaagtagttaatagccacatcggcaccttctctggcgtaagcaattgcggcagcgcggccgataccggaatcgccgcccgtgacaagcgcttttcgacccgttagtttacctgatcctttgtagcttttttctccgcaatcagggacaggtttcatgttcttttgcaggcctggcggttcttgatattgttcgggaaattcatcatgaaaaaatgcttttataggattcgtaagatttgaatcagacatcagcaacgctccttttctgtttggtgtacattcgtatgtgtacccctgagcataagcagaaaaacatgttttggcagtttgaatagtgaaggaaaaagaaaacaagaaaaaacaaagccttcttccatatttatcttgtcaaataagactatatgaattatgataaattcgagctataaatcaactaaatattgggtgttgggagagtgaatcgtcatgaaaaaagcggcggcggttttgctgtcactcggtctcgttttcggtttttcatacggagctggccatgtggcggaagccaaaacaaaggtgaaggtctataagaactgcaaggagctaaacaaagtatacaaaggcggagtggcccgcacatcgaaggtgaaaaacaaaggcggaaaaacgaagtacaagccttacgtttctaaggcgctttacgatgccaataaaaacaaagaccgcgataaagatcttatcgcctgtgaacggtaaataagaaaaagcaatctggtgtccagattgctttttctattgcttaagccgcctgatcggccgcagcgcttttcgccttccttgtcataaggctgactgccatcatgaccgtgatattcaaaagcagggcgacgatgccgacattcaagtcttttgcggcttgcggcagagccggaaataaagtgccgatcgtcgtttccgtcattgtaatataagtaactgctccgacacctgcaataatgccggcgaaagctccttgctttgtcaccatattatgcttgagcaggctgaacaaaagggcggggaatagctgtgtgacaaggctgtagcccatcaaaagcagcgtaacgatggtattcccgcctttgaaggtaaaatacaccgaaatcagcgcaatcaccggcactaaaaacttagcaagcgccgatacttgctgttctgtcgtgcggggcgcgattaccttgtacacattttttgcaaacagtgtggaggcggacattaagatcatagaccctggcacaagtgctgtcagcagtccggcagcaccgataattccgacaaaccaagggtcaaatgcttgcagagacagtctcaaaagcgacaaatccccgtctgcgccattcagatctggaacttgcaggatagccgcaaagccaacgaaaagaacgaagagcaggaccagctggtacaaaggcatgatgatggcgtttttacgaaacacttttgggttttcggctgaatacgaagcggaaaacgtgtgaggccacatgtaaaaaccaagcgctgtcaagagtacggttgaactgaaccaggccacactttgtcccgattcggggagcgtaagaaagccaggctttgccgtttcaatctgctgaaacatgtcttgaaatccgccgtagtaatgaattggcaaatacacacctaaaaacagaacgacaaccagaatcatgatgtccttcacaaccgatatccaggcagacccgtgaatgcctgaaaccataacataaaccgtgatggaaacagcgccgatccagatggcggcggtcggggtgattttgccgtacgaggtttccgatacaatcagcccgaggcctttcagctgcagtacaagatagggaatgagtgcggcgatgccgaccagtgaaacgagaatgccaagcagcggactgttgtatttttttgtgaaaaaatcagactgcgacattagtttatgctgtttcgcgtacgtccaaactgctggaagaagccagtaagaaaggatgtaggccagacatccgtaggcgatgatataaaaggctggaccgccctttccgtaggcccagccgctgccgccgagaaacgtaaaagtagtataaatttcgcctgccatcaaaaggaagacgaacacagttccgaagccgcgccctccaaccgtccactgctccaggttcatgtcttttcctttttgggcgcgtataccgagaaaaatactcaagagcaggacaccgaaaatgatgatgagagctgcattcattctgcttcctcctttttattttccttgtcgaggacatacacaatcgccatcagcgcagaggtcaaaagagcccacatcacaatataggcaagaataaacggcatgccgaacacgtagggggtcaccttatttgcaaaagggatgccgagtaagataccgataaagggcaaagcggcaagaacgtgaatcagtttcatagaatcctccttctatttaggattggggtgtacaagcccaagcgtactgaaaatgatgtcgcagatatggcagcacatgtcactttttagggtgaaaggctgtggttcgaattataaataaatttattttgtttgtatagtgtgaattgtctgaaattaatgctctgaatcgcccgaagagggaacgggcagtatgattcaaaaggctcggagtctgtccggggcaaatagatagtatgttaataattcgctgacctgctcacggattcgcggattaaaatagcgatggttttcttcataaccgtcgatgacaaatgtatagagcgtaaaggcttcatcgcgttccgtctcgcggattgcaatttttcttttcctcagttcttttctgacctccatcaaatccttttgtgctatttttaatgattcgctgataagctgtttataaggatgcttcaattttaatgtgctttcttcaattccggcgagatcacggttaaaaatcgtaatggccatgggcaaaaagagagcccgttcaattaaatcgtatatttcctcctgcagatttggcatgttgactccttctttctaagggaacgtttgttctatttgtattctatatcggctggtgaaatgtttcaagacagaaaaaatcaccaaaactttttagttttctgctgataatgtgtagaataaggatagacaaacccggtaaggagtataaatgttggagcattttttatcctatttgacacaagaacatttaactgaattatttcaaagctatagggctttcggtccgctcatagctgtgctgctgcctttaattgaagcatttctcccgtttttgccgctgatcgtgtttgtggtggcgaatacgaactcgtttggcttgtgggaaggattcatcctgtcttgggcgggatcaactgctggttccattctcgtatttttgattgtccgtcaatacggacagagaaaattgcttggatttatccgcagtcatccgtctgtaagaaagctgatgttatgggtggaaagacacggcttcggtcccatgtttcttctgctttgttttccatttacaccgtcagccgcggtgaatgttgttgccggtttgtcaaggatcggaacgcggccgtttattttggcggcagcctcggggaagcttgtcatgatttttatgatcagcttcatcggatatgatctgcacgcgctgattacacagccgattcgaacggtcatcgccgtattggtgatcactgtcttatggtatgtcggcaaaaaggtggagcggtatctgcatgtaagagccagtcagcgtgagcatgatggagggagacagtaacatgaaaaaacggttttggtttcttgccggtgtagtgtccgttgttctcgccattcaggttaaaaatgctgtctttattgattacaaggtagaaggcgtcagtatgaacccgaccttccaggaaggaaacgaattgttggtcaataaattttcgcatcgatttaaaaccatccatcgttttgacatcgtcctttttaaaggccctgatcataaagtgctgattaaacgggtaatcggcttgcccggtgaaacgatcaaatataaagatgatcagctgtatgtgaacggaaagcaggttgctgagccatttttgaagcatttgaaatctgtttctgccggcagccatgtaacgggtgatttttctttgaaagatgtgacgggaacaagcaaggtgccgaaaggaaaatattttgtcgttggagataatcgcatatacagcttcgacagccggcattttggtccgataagagaaaaaaatattgtcggtgtgatttctgatgccgaataaaaagacgctaatggaagaggcgtctttttgtatgccgtttggaaaaatgtgttgaagaaaaatttgtaaggagctataatcaaaattgttacctgtgtaacaaaatttatatattttttgattggaggtccgtttttattggtttttgttcgttttgtatgaaacaaaaggagtggtgaatgatgatgaaatatgaagcagtgattataggaggagggccggtcggatttatgctggcttctgagcttgcgatggccggagtgggaacatgtgtgattgaacggcttgaaaaacctgttccgcattccaaggcgttgacgctgcacccccgaacgctggagcttcttgagatgagagggattttagagcggttcgtatccaagggaagcaagatacctaccggacatttttcaatgctggatacccgtctggatttttcaggcttggatacgagctgtccttacacgcttttgctcccgcagtcaaaaacagaaaagcttcttgaagatcatgcacgaagcctgggaacagaggtgtttcggggtgccgaggcgctggcggttacggaaaacggggaagcggtccaaacaatttttaaggatcgggacggcagtgtacggacgatcacaagcaagtttgccgttggtgcagatggcgccggaagtaccgtccggaaacaggcaaaaattgagtttccgggaacagacagcactgtcaccgctgcgcttggggatgtggtgctcctttctccgccgccgtcaggcgtgctgtccctttgcacaaaagagggcggtgttatgattgttccgttatcttcagaccgataccgtgtcgttgtgatcagtccttatcgcacacaaatgccgaaagatgtgcctgtgactgagaaagagctgagagctgatctcctgcgaatttgcggaactgacttcggtttaacagacccttcgtggatgtcgcggttcgggaacgccgcgcgccaagcgaaacggtatcgggacggcagaatctttcttgcgggtgatgccgcgcatattcattttccagcgggcgggcaaggactgaatgtcggccttcaggatgcaatgaacctcgggtggaaactggcggcggccatcaaaggctctgcgccttcttggcttttggacagctaccatgacgagcggcatccggcagcggaagggctcctcagaaacacggaggcacagacaaagctgatcgatttcactcaagcaggcctccatttgcgaagcatgatgtcggagctgctggccttccctgatgtgaatcgatatgtagcagggcaaatttctgcactcgatgtcagatatgaagctgatcgtaccatgccgccgaatcgtttgaacggggcacggctccctgacatgaagctgattctttccgacggcagttcggaatggctgtacagctttctccaaaacgggtcattcgttttgctgtcattgaggcaggaagctgatgagcatatcgaagtgaaaggcttacgtacggtaaccgcctcgcttgcagaaccgaatgaaaagttgcgggatgtgcataccatattggttcgtcccgatggacatgtagcctgggcggtggatgcatcagcgcccgattgttccgaggtgattcaaaaagggatcagccgctggttttccgtcaccagccgagtataattcaattcgattgtttcatctgtaacaaaacggtatgatagaagaaacaatcgaatgaaaaaggatggaaaacccgatgaacacagatcatacgaaacgcaatctttttgaattgtatgcggagctcattcatcaacaggagaaatgggaggggcttattaaagcctttttatctgacgaattgaggaagctggatgtagagcacgggagtaaatctcaattgacgatgacagaaattcatgttctatcctgtgtcggggacaatgaaccaattaatgtcacgtcgatagcagaaaaaatgaatacgacaaaagcgactgtatcacgcatcagcacaaaattgctcggcgcaggcttccttcacagaacacagctcagcgataataaaaaggaggtctacttccgattgacgcctgctggaaaaaagctgcacagtttgcacaaatattatcatcagaaggctgaacagcgttttctgtcattttttgaccgctataccgaggaagagattctttttgcggaacggctgtttcgggatctggtgacaaaatggtatccgtcgtcagaagaaattgaaggggggcttcctagcatttttaaataaaaaacacgcactgaggtgcgtgtttttcgcttttttctatcttgttcaaggctgtaacgtaaatcagatttcatcttgaagaatgaaattcaagatgttctggaatttgcactgcttatacgatatgtctattagtatctttattttatacgttttttactgtgtttttgatgctttgttttcaaatgaaatagggtcttctgttttagttctcctaatctttacagaaatacctactagaatgaccgccatagttgtaaatattcccatggttaataagatcgtatcctgatttaaactccatccaattaagaaagagatgatcgctcctccgaaacttgccgaagcaataaataaacttgtaacttcgtcaacgtacttctgaataatgattgatgctagtgttaaagcaatgggaaatatgcccgctatacttaggccaatcaaaaatgtaccgcccaattgaagtattgggttacttatataagagaaagcaatcaacaaaacaattaaacaactacagctaaaaaggaggtatttagaaaaatcaagccttctacttacgaaaccaatcaatattcttcctatgatgatccctacccagaaaaaggagacacttataagactaatttgttcattgtcttggtttatcatgattgaaggtaaaaagttggcaaaatttgtttcaattccagcatataggaaagcgaaaaatacaaaaaagcctaattgctttgatttttttctatctcctataaagtattgaaatgctcctccatctggaaaggtcacttgttggttagcattcttagcgtactctcggttcttagacaagaaaattaaccaccctacgaataggacgaataaaaaggtgaatatacagtaatacggtaaaaaccagttattgatatctatgaaggaattaattaataatgggaaagataaagcgcctaatccaaagagaacttccagcttactcattttttctgcattactttcgaaattagcaataacaaatgaaccaactgtcgtttctaatgtgcctgccccatatcctaagagaaaagccattacaacaatataataccaatccttagttagaaaaaagatacttaacgctgcaagcattattgtcaaagctaaagtaagtgtcctaaaatgactgtatttcttaatcattaacggtgcgattaatactccgcttagaaatccggtaaactgaaagaagattatgaccgaaatatcatctgttgtcttgttaaaagactctaatagaaatggtgtcaaactccctgttgatatatggataatgcctactgtaaaaaagaaagcatatccaaataaatatgtccctcttaacattcattacacccctatatgaaaaagcaggaaaataaattcctgcttttttagtaacttctctcttcgaaatactagttgactgctgaaacagacattggttgagagttgctgtctttctcaaagaacatttctaatacttcctgagatctaaaaccatcactaaaagaagggatctcaacccaatcattctgagttgatgcaatccaattgattaactcgcttctaaaagaatcagcccatccataaaactcgtttggcggatcgtttaataggctttgcggtactgggcagtctaccacgttcaagccatctatgagcttgtaaacgtgaggattacctgtgtggtatttaaactcttttttgtgtccaactacctcaatgctaaaaccacagtcttcaggtacagaacattttgatgtgatgatatttacaaataccttgttcttcagctggccataaatttctgcatagtcatctacgagtacctgtttatcctcttttgtttttacatttgtgttcatttttgccgttactgattctgtgatgaaatcactctcaaacaaataccataccatgtcaataaggtgaatacccagatcccccaatgatccactcgtcttcttactgttagcgtcatctctccaagtaaacttcttacgcctaagtgcactatttttcttgaagtgtacttttatggacagtatgttacctagttcattattgataattaagctttttaagatatttacgtaagataaatatctataattaaatcccatactggctcttacgctcaacctttcagcagtatctttcattatgcttgcttcttcaagagaaatagccataggcttttcacacaaaacatgcttatgttttcctaatgcttgcaaagcatgttctttatggcaaaagtttggtgatgctacaattaaaccttctgaggcatcaattagttcatctacgttttcaaatgacttcccgccgaaagttttcacaaagctttccgcattttgttgatttatgtcatatacccctactaactctgcattttttattgtagataaagcagttgcatgcgctcttgcaataccacctgcacctatgatgcctatcttcttcatttttatttcctcctcatgatccaattaatttttttaaggtattagtaattccttttgagtactcactatcagttataaggtggtgcaagttttttgcttcctgtgttgcattttttagcagatatccattccctactgtctgtaacatacgaacatcatttccactatccccaaatgcgatagctctttcggtatttaggttgtatttctctaacataaacgttacaatttcattctttcctgtccctgtggggataaaatctacatcatagctgtcttctggatcgcctgctaagggattacaccgatttatatttactgaaacgccgtattcctcgcagattttttcaattgctaataggtttttcttgtcgtttatttcatcttgttcctgatagtagaagttatgcttataccgtgactttcctaattgagtttgaggattcaaaagaatgttatgattttcatgtagctgtttcacaagtttttcaaccttttctttactaaacccttcattaatgcgactgttccacttgttatcttgctgaccgaagttatgctctgaaaagtacgtaatttcagttccaagatcactagctataaaatgcggaaaatatctaaattttcctcttcccattttatcgagaatagattctatactgctcccagtaacccatccgattattagcttcccatctttacttttttgttctagatagtcttcgagttcatagatgtcttgttgcttttgttcgtcgattgtatgcggaaaatacgtttcatcaaaatcacaaaaaacaatatactgaggatgttcaaccgtggataacgttttatactccgatttcttgcttaataacatgaaacagtccctccattactctgtcttgttcttctaaagtaaatgacggatataaaggcaaatgcagtacctgactatgagccttttccgtatgaaccaattggagtcctgcatacttgtcctgtactaaaggagttttttgcatatgagacagtattggataatatacatctgtttgaacaccaaaatcttcatttaatttagtcatgatatctgcccgatcttctgttcttaccttaataggaaacagatgccatacatgatcttcacttaattctggtaattcaatatagcctttattctgcaactctgctaattgggtaatgtatctatccgccaagaacaatcttttgaagttgtttaatgaaaggtacttcattctctctaaaccaattgctgcctgtaaattgtccatttttgaattaaatccaaaattgatgactttcttattttttacatttacttcaaaaccgtgataactaaattgaatgcattttttagcgagttcttcattatcagttgctattgccccagccttgccacatacaccaaaattcttatagggattaaaacttaatgtagtgatgtctgcatactttcctaagtctgtcagtccaattccttggcaggcatcttcaattactttcaatttataacgatttgcgatttgacgaatatgctgcatgtctgaatgttttccgtataaatgcacaggtagaataaactttgtataaggagttattgcttcttcaattttgtcaggatcgatgcagaatgtttgtgggttaatatctacatagataggaacgcctcccaaagctaacacagcattttcagtagctgaaaagctattagccggcatgataacttcatcccctgggtttaatcctaaagccaataaacctatcataatagcatcggttccactgctggttgcaattacataccttttatgtaaatatgtagataaaactttttcgaattgctctaaataggaaccactcgtaaattttccagttggcaaaacttcagttaatgtatttaagatatcttccacttcatcattggttattaatctgtctacaggcaaaaaagggactttactgatttcacgatttttttgatagttgaaaagatcatgttcaatatctatcttttcttttaatacttgtttccaccgctcgtttacaatactgtcttcaataacaagttcttttccttgtacgtcaccttttaagtgttttaatagtgacatgttttctttgcttttacctgaaatcttaacctgtttttgcatgaacagtacctccaatgattttataatctaaaaatttattacaaatttatcctagtttctgaaatcggtaacatgtcaacaacttttttaaggaagggaaaatatgcctacaattgatgaaatagcaaaattatgcaatgtgtctaaaaccacagtgtcaagagtattgaataatcatccttatgtgtcgaaagaaaaaagagatatgatcttaaaggctattaacgaacttgactacactcccaattatttagctcggaattttaggagaaataagacacaaacgatagctttatcggttccgagtatcgaccatccattttttgctcaattaataaaaggggtctctcatgaagcactgtttaagaattacaaggtaattgtatttcagaccttttatgacaaacagacggagctagaattactagagttattgaagcataaagaagtggatggcattattcttgggactttagaaaatgaatgggatcagatatcccctttcttaaagtatggtcctatcttattatgtaatgaatatcatcactcagcggacatcacgataattgggtatgatgaatttgaagctacatacatgggggtagtacatttaattgaaagagggcataaaaaaattgggttttgttttgatactccatatagcgaagctcaatgtcagaggaaagagggttatttgaaagctttacaagattacgatttacatcatagaagcgaatggatattcggcgaaatgtttaatatcgaggatggctttcgtgtttttcataagataaaggatctaaaggacagaccctcagcaatatttacaggaaatgatcaagtcgccgcagggattattaaacaggcgatgaaaaatggctttaaagttccagaagacttagctgtaattggttttgacaaccaattgatctgccaagtcgttactccgaccataacaacaattgatatccccgtaatagaattaggtcaacaggctgtgttgaaaatcatcgagtccatttcgggtaatgccactttaaacagaagaattattaaactgccaacaaagcttattataagagaatcaacgtaacgatagatttccctttatcattttatatctttatataagaaaaagaggttattcattttaacctctttttcaatcgtaagtcgtcaattatttctttcatttcaccctctggcagcattcacttcaaacctgatccattaacaacgaaatatccgcttatatttcctcatctcgatggtttgcgaattaaaagttcttgaacccttttttcaactaggcactactgccgctgattgagctctttttgtcttttttttcaccatgaagatggtgaagcaggcgataaaacggcggcagcagggcaataaccagaatgacgcgaatgacctgaaccgcaacgacaaaggtggaatcagcatgtaaggtaacagacgtcgtcgccatctctgcaatcccgccgggcgcaaatgccagaacagaagtgatgagcgaaattcctgtcagctcggaaacgatcacggcgctcaaaaacattgctgcgattaaaccgacggacgagacaaacccgacgatgataatacgggtgacgccggcaaacatgcttttatacatcttagagccgatcgttgccccgagaaatacttgtgatacatggttagcttgtgacggccaccatgccgtcatgtcgtgccctgtcaccgcagctccgccaacatgtacaattgctacaccgagcatgctgccgagcagccatggagctggaaattttaaaaatttcgcagctttgcaagctccccaggcagcgagaataagaatgacggtccacaaaacgggagcgagcctaaaatctgtcgttgcagaagaaatcgtctctgctgcggcacttgcggtacgatcttgttttgtatagatcagaatgactaaaaacggaatggaaagcaccacgagcagcacacgcatcatttgaacgaggctgactattgcggtattggcgcctacttcctgtgcgatgctcggcatggcggaaagcccgccgggagcggtgccgacaaagctagtcatcatatccgttttgctgaaacgccaaagcacatatcctgacagcatggccagcaggatagacaatatcagcataacgccgactgaaaaccaatggtctttgagaacagagagaacggataaattcagcttttggcccaattcaatgccgaggatcatctgcccgagggcgagccatcgtcggttaattcctttttggtctggtgccatcatcagccatgccggccgtatcatggcgaggcagcaggcgacaatcagtgttccgatcatccatccaattgatattccggttaatgaaagaataaaccccccggctgcactgattgcgataaaccatagatctttgaggagattttcgtctttcttcaatgtaaaacccttcttcctttttcacgtaacactccaattgttcacgtagtgaatgtatttattactatagtatatttttgttgataaagaaattatgaattattttctataagcgattcacttttcttatgaccttgtgttcgagcttttctattgtgtaagtcagagataaacccgctgtcagcagacacacggcaagagcgtaaaaaatcacttctccgccaaatgatgtcaggatcagcccgcctgccagcggtccgattgagcgggatatatcccaatgcagaccatagacagcataaaaccggcccagcaaatgaggcggcgccaatttcgatatgaaggtctggatgtgggttagcccgatgctttcgccaaccgtcatcaccgctgccgtcactaaaagcattgtcagggaggttgagcatgcaaaaccggcagccgcaagggagtagcaaatataagtaatgaaaaggattgttttcattgaaagcttttcggtccctttgacaagaggtacttgaagaacacagctgaataaagcttttgctgctgaatagatggtcagcatggacagataatcagaaaacatgtttttgctgaacagcctgtatgttgtttctgattgtgcatataacatgctgatggggagagaaagcagcaaaagaagcaggacaggcctgtatatcgtaaagctcgcggacattttcggggtaacagctgggtgtagcggctttgtctcaggcagtttcagtgcagcgatcagaaagtagataaacaatgccgcagcatctaatgcgaatatccacacggggttatgattgtacagcagcatccccactagcggtcctgccgtcagacccgctgaatagatcgcattgatgaccgcaaacacttccgaacgtctgctttccggcgtgctttcagcgatttgggcgcgggaagcgggaatgtacaacgatcttccgatgccattcatgacatagagaatagcgaaaacatacgcatgctcagcaaatataaaccctgtcattgccgctgattgaagaagcaatgcggtcaaaatcgctgtgcgccgcccaatccggtccgccgcctttcctgcagcgagcgtcaggaaaatatcagcaaatggctgaaggctgatgatcagcattggcatcatgatactgccgtttaattgttcatgcagatacagcaccataaaaggtcccatcattgcacctgtcaggcttgtcagcaattcgccgaaaaagcggagccgaacgggagcggtatatctcgattttatagagtgaaaactggtcaacatgtgatcgccgcctttcgctgtttgatatagtagtagtgtatagaaggggcggcggcccaaaaagtgaagaaaagaagagataaaagttccccttttgtcgggaggtgcggggattgaagctgatagagcactacgtggcgcttgtaaaaacaggctgcgccgagtatggacaaatgaacgaaatgacactcactgagattgccgactgtttattttgtacagaaagaaatgcaaagctcattttacataagctggagaacagcaattggattatccggaaaagcggggcggggcgcggccgcaaatctaaaatcgcgtttcttcggaggcctgaggaactgcttcttcaaactgcaaaggaatataccatgtcaggaaagcttaaaaaggcaaagaagctgcttcagcagtatcagtccgcgtttccggggcttcaaaacgaatataacatgtggctttcagaggtattcggatttgtgacggagacaggcgagaatggggcgaaggatgttctgcggctgttcatcacgcccgaatctgtcagcagtttggatccatgccaaatatttttgcggtctgagggccatttcgtcaaacagatatttgatacactcttcacgtttgattcggatatgcaggagccaaagcctcatttggttcatggatgggaagaggtcgaaaaaaaacaatggagattttttcttcgaaaaggtgtgtcatttcataatggacagccgctgacatcgcgggacgttgcgtttacgtttcagcgctttttggaactgggtgacaacccgtataaatggcttctgcacggagtgaaacaagtcttagaaaagggcccttattgtgtggcgctcatactcgataggccgaatgcgcttttgccgtatgctctttgtgatgaacggctgtccatactgccggcagaacagggcggcgggaaaaatggaacagggccttttcaggtgaatcagcaacacagcgggatgcttgtgcttgaagccaatgagcgctacttcaagggacgcccctatttggatcgcgttgagtttgtgttttctgagcaagccggagagatgaacggttttaccattcaagaaaaacaaacatgtcctgagcagcaaactgtttttgatgagcggcatgttcagtatttgtcgctcaatctgaaaaagaaggggcctcttcagcaccaaagctttagaaaagcgctccggctgctgatttcctctgaacggctcgttcgtgaagcgggagggcaccgaagaatcccggttacgtcctttttgcatccgagttcttttgagtgggagggcgtttcgccatctgaattgttgaagaaaagcggttacgagggcgaaacaatcgtgctttataccttttcggaaacggatcatcgtgaggacgccgaatggattcaaaatatttgcgcccagcacggtatcaggcttacacttcaattctgtgatgctgctgatctgcgacggccggaaaccgtgcagatggcggatatcattcatgacagtgcgacgttttatcaagacagcgagtttggttttctgcatttgctgctgtcggagaacagtttcttgtatcagcatctatctgaaaagctgacacagatttgctcaggaatgatagagcggatgttttccatgcctgatcgctgttcgagaatcaacatcctgcgtgacattgaccggcagatgatacaggagctgaacgcgatcccgctgtatcaaaatgtgctccaggtgacatcaagtaaaaatgtaaaaggcctggtgcttgatgaagagggatggattgatttgtactccgtatggctgtccaaataaaaagagggttcttttttgaaccctcttttttaaactgccatgctgcggcattgttcagcacaggcgaagcaggctttcgcacatgcttggcaatgatcatgatcgtgctttccgcattcagtgccgcatgcttcacaaatatcggcgcaaagtgcacaaatttctttcataaacgggctgtccgtttgcatggctttgaccgccagcgcgcaaatatccgcgcattccctgtcaagccggatgcagccgctgagatgatgctgcacgctttcttgcaagcatttagtgaaacaatgattgcaagccttcatgcaatcgatgcaagcctcaatacaagcttcagaatattgctccatggttgattccccctgtatgacagtatatggttttatgtttcccggctgcatttgaaaaaaacaggggagtgtgtttttagctaaggggatatgtacatataccctgaacgggtatatctaaccatcagatagtataggaaccagacagcgtgattttgttcatcacgtgctgcgcgcgtaaagacgcctttcgcttttaagtttgacgtttcctcggccgcacgcaagtaaaagtcgacggtttcttgttcatctttaaaagcggcatccagtcctcttgtgaaattgtccgggcattcttccgtttgtttcggcatgatgtgtttgccggtaattgaaccatacagtgtggaaaattcacggaggtggcgaatctcgtcacgcctgatttcttcaatctgttttctgacctcatcgctgtgggcgagttcggcgagcttgcggtagcattgaatggcactgaattctccgttgatggccttctgcaaatttcgaatcaaaacaggatcttccctgtatggcaccggatagggatagtagctgtaatgcaaggggattcaactccattcttaggaattgggcttctgtaaaagtatatgttgggcagggagagatgtgcggagataatcagctttttatatgtgaaaaggccgtttttaccaatagatcagattggtcattttcgtcaacattcgataaaatatatagagataaaaagagaggggtcttctaatttgggagcagagtttttagtaggcaggtccgggagtggaaaaacgaagctgatcatcgacagcattcaggatgaattgcgccgggctccattcgggaagccgatcatttttctagtcccggatcaaatgacgtttttaatggaatacgagcttgctaaaacgccagatatgggcgggatgatacgcgctcaagtgttcagtttttcacgattggcctggcgcatcctccagcatacgggaggaatgagcaggccgtttctgacgagcaccggcgtacaaatgctcctgcggaagctcatagaggagcataaacaggagttcaaagtctatcaaaaagcgagtgacaaaagcgggtttaccgcacaggttgagcggatgctgacagagtttaagcgctattgtctggaaccggaggatatccgccggatggcggaaagcggaacggcttccgagtatcgcggagaacgtgttttatctgaaaagctccatgacttatcaattctgtatcagcaaatggaaaaaagcctcgcagatcaatatcttcactctgaggattatttgacattgctggcagagcatatcccgcttgcggaagatataaaaggcgcccatatctatgtggatggcttttatcagtttaccccgcaggaattcagggtgttggagcagcttatggttcatgcggagcatatcacgttttcgctcacagcggacaagccgtcatatgagcgggagccgcatgaactggaattgttcagaatgacggggaaaacctattaccgcctgcatcagaaggcgaaggaactgaatttggacattacgtataaagagctgagcgggactgagcggcatacaaagacgccggaattggcgcatctagaggcacagtatgaagcgcgtccggccattccatacgcagaaaaacaagaagcccttactgtgatgcaggccgcaaacagacgagctgagctggaaggcattgctcgggaaattcacgccctagtcagagagaagggatatcgctataaggatgtagcaattcttgcgcgccagccggaagactacaaggatatggtgaaggaagttttcgcagattacgagattccttatttcattgacggaaaagcatctatgctgaaccatccgttaattgaatttatccggtcgagccttgatgttctgaaagggaattggcgttatgaagcggtgtttcgctgcgtgaaaaccgaactgctattcccgctcaatgaaccgaaggccaaagtgagagaacaggtcgatcagctcgaaaattactgtatcgcctatggtattaaaggcgaccgctggacaaagggcgatcggttccaatacaggcgttttgtgtcattggatgatgattttgcgcagactgatcaggaaatcgaaatggaaaacatgttgaatgacacccgcgattggattgttccgccgctttttcagcttcaaaaacgcatgaaaaaagcgaagacggttcaagagaaggcggaggcgctctatcgttatttagaagagacggatgtgccgctgaagctggatcaggaaaggcagcgtgctgaggatgacggcagaattattgaagcgcagcaacatcagcaggcgtgggacgcagtcattcagctgcttgaggagtttgttgaaatgatgggagatgatgagatttctcttgatttgtttcagcaaatgatagaagccggcgcggagtcgcttacattttctctaattccgcctgcgcttgaccaggtgtttgtcggcaatatggatttgtccagaatgtatggcacctcctgcacctttgtgctcggggcaaacgacggcgttctgccggcacgccctgatgaaaacggggtcctgtcggatgacgaccgggaatggctgaaaacgattggggttgagctatcctcaggcggacgagagcgtttgcttgatgagcacttcctcatctacatggcgttttcaagtccgtctgaccggctttacgtatcgtatccgattgctgatgcagaaggaaaaacgcttttgccgtcgatgatcgttaagcggctggaagaactgtttccgcatcataaggagcgcctgttaacaaatgaacctgaacaggtcagcgatgaggaacagctgatgtatgtcgtgaataaaagcgtggcacagtcctttaccgcgagccagctcaggttatggacacgggaatacgacatcagcgacgtctggtggagcacgtacaatgtgctgatgagtgagccggacaggctgcagtcgaaaaagctgttctcaagcctgtttttccggaatgaagtgaagcagcttgaacgcagcgtgtcgagacagctctatggtgaacgcattcagggcagtgtatcgagaatggaaacctttaacgcatgcccgttttcccattttgcgtcacacgggctgcatttgaaggaacggcaattcttcaagcttgaagcaccggatatcggccagctgtttcattccagcttaaagctgatttctgataggctgcgtgagcaaaagctggattggcgcgatttaacgaaggagcagtgcgagctgttttcctatgatgcggtagagcggctggcaccgaaactgcaaaaggaaattctgctcagctcaaaccggcattattatgtgaaggaaaaactgcaaaaaattgtgacacgtgtgtccggcattttaagcgagcatgcgaaagcgagcggattcgtaccgatcgggcttgaactgggctttggaggaaaagggccgcttccgccgctgacctttcaactgaaaaacggctgtacgatggaactcgtcgggcgaattgaccgtgttgataaggctgaaagctcaaaaggcctgctcctcaggattgtcgattataaatcaagcgacaaaggccttgacttagcggaagtatattacggattggcactgcaaatgctgacgtaccttgatttatcgattacacattcagctgactggctcgggatgagggcgacgcctgccggagtgctgtatttccatattcatgacccgatgattcaatctaatctcccgcttgggcttgacgagattgaacaggagatctttaagaaatttaaaatgaagggcttgctcctcggtgatcaggaagtggttcgcctcatggatacaacccttcaagagggacgttcaaatatcataaacgccggcttgaaaaaagacggctctctcagatcagactcagcagcagtcggtgaaaaggaatttgatcttttgacaaagcatgtgcgccgcaccttccaagaagcgggcgaacaaatcaccgacgggcgcgtatccattgagccgtacaaaatgaagaacaagacgccgtgcacatactgtgcgttcaaatcagtatgccaatttgatgaatcactggaagaaaacgagtatcgcccattaaaggctgaaaaggacaagacaatacttgagtggataaaaaaggaggcggatggcaatgaacattcctaaaccggcagacagcacatggacagatgaccaatggaatgccattgtttcaaccggccaggatattcttgtggcagcggctgcgggctctggtaaaaccgctgtgctcgttgaacgaatgattcggaaaatcaccgcggaggaaaacccaatagatgtagaccgtcttctcgttgtgacatttacaaacgcctcagcggcagagatgaagcaccgaatcgcagaagccttggaaaaagagcttgtacagcgccccggctcgctgcatattagacgccagctgtctcttttaaaccgggccagcatttcgacgctccattccttttgcctgcaagtgctgaagaaatattactacttgatcgatcttgatccgggctttcggatagctgatcagacggaaggcgagctgatcggggatgaagtgcttgacgagctgtttgaagacgaatacgcaaagggcgaaaaggcgttttttgagcttgttgaccgctatacgacagaccggcatgatctggatctgcaatttctcgttaaacaggtgtacgagtattcccgatcccatcccaacccggaggcgtggctggaaagctttgttcatttgtatgatgtatcagaaaagagcgccatcgaggagctgccgttttatcaatatgtcaaagaagatattgcaatggtgcttaacggggcgaaggaaaagctcttgcgcgcgcttgagctgacgaaagcgccgggcggcccggcgccgcgtgctgacaattttcttgatgatcttgctcagattgatgaactgattcagcatcaggacgatttcagtgaactatataagcgggtgcccgccgtctcttttaagcgtgccaaagcagtaaaaggggatgagttcgatccagcgctccttgatgaggcgacagatttgaggaacggcgcaaaaaaactgcttgaaaagctcaaaaccgactacttcacgcgaagtcctgaacagcacttgaaaagcctagccgagatgaagcctgtcattgaaacgctcgtacagcttgtcatcagctatggaaaacgattcgaagctgcgaaacaggaaaaatcaatcatcgatttttcggatttggagcattactgtttagcgattttgacagctgagaatgacaaaggtgaacgtgagccgagcgaggctgcaaggttttatcaggaacagtttcatgaggtgctcgttgacgaatatcaggataccaacctcgtgcaggaatcgattctgcagctcgtcacaagcggtccggaggagactggtaacctgtttatggtaggagatgtcaaacagtcgatttatcgattcaggcttgcggagccgcttcttttcctctctaaatacaaacggtttacagagagcggagaaggcacggggcggaaaatcgatttaaataaaaatttccgaagccgggctgatattttagacagcacaaactttttatttaaacagctgatgggcggcaaaatcggtgaggtcgattatgacgagcaggctgagctgaagcttggtgcagcgtatccggacaatgacgagacggaaacagagctgctgctgatcgacaacgcagaagatacggatgcaagcgaggaagcagaagagcttgaaacggtgcagtttgaggcaaaagccatcgctaaggaaattcgtaagctgatttcatcgccgtttaaggtgtatgacggaaaaaagaaaacacatcgcaatattcaataccgagatatcgtgattttgctccgttcgatgccgtgggctccgcaaatcatggaggagctgagagcacagggcataccggtttacgccaatttaacgtcaggctatttcgaagcggtcgaagtcgccgtcgcgctttctgtgctgaaggtgattgataatccgtatcaggatataccgcttgcctctgtgctgcgctcaccgattgtcggagcagatgaaaacgagctgtctttgatccggcttgaaaataaaaaagcgccgtactatgaggcgatgaaagactacctggctgctggtgaccggagcgatgagctttatcaaaagttaaatacgttttacggacatctgcaaaaatggcgcgcgttttcgaaaaaccactcagtatctgagctgatttgggaagtgtaccgcgacaccaaatatatggattatgtcggcggcatgccgggcggaaaacagcgccaggccaatttgcgtgttctttatgacagggcgcgtcaatatgaatcaacggcatttcgcggcttgttccgtttcctgcggtttatcgaacgcatgcaggagcggggcgatgatcttggtacggcgagagcgctcagcgagcaggaggatgttgtccgcttaatgacgatccacagcagcaaagggctcgaatttccagtcgtgtttgtagcaggtctcggccggaatttcaacatgatggatttgaacaaatcgtacctgctggataaggagctcggatttggcacgaagtatattcatccgcaattacgcatcagctatccgacacttccgctcattgcgatgaagaaaaaaatgcgcagggagctgctgtcagaggaattgcgtgtgctctatgttgcattaacgagagcgaaggaaaagctgtttctgattggctcatgtaaggatcatcagaaacagcttgcaaaatggcaggcatccgcgtcccaaactgattggcttctgccggaatttgaccgctatcaggcgagaacgtatctagatttcattgggccggctcttgccaggcacagagacttgggggatttggctggtgtgccagcacacgctgacatctcaggtcacccggctcgttttgccgttcaaatgatccattcctatgatttgcttgatgatgatctggaagaaagaatggaagaaaaaagcgagcgcctagaagcgatccgccgaggtgaaccagttcccggctcgtttgcgtttgatgaaaaagcccgcgagcagctgagctggacctacccgcatcaagaagtgacgcaaattcggacaaagcaatcagtttctgagatcaagagaaaaagagagtacgaggatgaatacagcggcagggcccctgtaaaaccggctgatggaagcattctgtacagacgtcccgcttttatgatgaaaaaaggcctgacagcggcagagaaagggactgccatgcatacggttatgcagcatatcccgctgtcacatgtgccgtcgatagaagaagctgagcagacggttcacaggctttatgaaaaagagcttctcactgaagaacaaaaagacgctattgatatagaagaaatcgtgcaatttttccatacagaaatcggcggacagctgatcggtgctaagtggaaggaccgggaaataccattcagcttagcgcttccggccaaggagatctatcctgatgcacacgaggcagatgagccgcttttagtgcagggtattattgactgtctctatgaaactgaggacggattatatctattggattataagtcggaccggattgagggcaaattccagcatggatttgaaggagcggccccgatcttgaagaaacgatatgaaacgcaaattcagctgtacacgaaggcagtggagcaaattgcaaaaacaaaggtaaagggatgtgcgctttatttctttgacggagggcacattctgacattatagcgagatccataagctccggaatttcaggcggagcgggtctcgttttctatataaaagagaggtgaaagcatttgcggattttacatacggctgactggcatcttggaaaaacgcttgaaggaagaagcaggctgagtgaacaggccgatgtgctggatgaactgaatacgattgtaaaggatgagcagatcgatgccattgtaatggcgggggatgcatttgacaccgtaaacccgccagctttagccgagcagctgttttatgaaagcctgtctgcgcttagcgacagaggaaagcgcccgatcgtcgtcattgccggaaatcacgataatcctgaccgtttgtccgccgcttcaccgctgacacatgaaaacggcattcatttaatcggttatccgacaacagagccgattcatattgaagtgccttcagcaggagagcttttggcggttggagcgctggcgtacccatctgaagcgcggttaaatgaagtgctatccgatacgtttgatgaaaagctgctccgtgatcactatgatgtgaaaatcaggcaggcgtttgagcatatgacaagccggttccggaccgatgcagtgaagattgccgccagccatatttatgtggcaggcggaaaccaaaccgattcagagcggccgattgaagtcggcggtgcatacacggtggctgctgaaagcctgccggcagatgccgcttacgttgcgctcggccatttgcatcgcccgcaaacgatcaagcgggcgcggacgcttgcgcgttattcaggatctccgctcgcctacagcttttctgaagcgggctacgctaaatcagtgacgattgtggacgcaaagcctggggaagaggccacttggcaagaggtgttattatcaagcggcaagccacttgtgaagtggaaagcggcaaatggattaagtgaggtgtacagctggctggatgaaggcagagatcagaatgcttggattgacttggaaatccgtgtcgcggaccagctgtcacttgaagagattcacaggctgcggaaggcgcacccgggctttatccatatcaggccggtttttgaagaacagaacaaagaccgggaacggatcgaggttaaacatgtctcaatcgaggaccgctttaagaaattttatgaaaaacaaactggcggtgcggtgccggatgaagaaatggtgaagctgtttttagagcttgcatcaggcgttgaagaggaggatgcgaaatgaagccgatcgccttaagcattaaggggctccacagctttagagaggagcagacgatagattttgaaggcctttccggtgccggtgttttcggcattttcggcccgacaggaagcggtaaatcctctatactcgacgcaatgacgcttgctttatacggaaaggtggaacgggcggcgaataatacgcacggaatcttaaatcacgccgaagatacgctgtctgtgtcctttacctttgcgcttcagacgaatcaccaaatctcatacaaagtcgagcgtgtgtttaagagaacggatgaaatgaaggtaaaaacggcactttgccgcttcatcgaaatcaaggacgagcatacggtgctggctgataaagccagcgaagtgaataaaagagtggaggagctcttagggctgacgatcgacgattttacgagagcggtggtgctgccccaagggaaatttgctgaatttctgtctttaaaaggggcagagcgcaggcatatgcttcagcgtttatttaatttggagcaatatggagacaggcttgtgaaaaagctgagacggcaggcgcaggaagccaatgcgagaaaaaatgaaatgcttgctgaacagtccggtctcggtgaggcgagctcagaggcagtggagcaggctgaaaaggttctcgaacaagctgaagcccggctggaagcgatgaggaagaaccgtgatcaggcgaaggagcggtttacagagcatcaggagatatggaatgtccaaaaggaaaaatccacttatgaagaagaggaaaaacgtctcgcagaagaacagccgcatatagacagcatgcaaaaacgcctgctggaagcagaaacagcagcagcccttaaaccctatgcggaccggtacgcagaagcgatccagcatgaggagcaagctgaaaaggaacaaacgctagcccaaaaggatttagcagaccggacagctttctttcagcaaaaacatgaagagtatgaagcgtggcgccagcataaaagcgagaaagagcctgagcttttaacagagcaggaacagctttcacgcttgcaggaaatcgaaatcaaactgagtgaggccaagcaagaggaagagcgcaaaaaggctgacctccggcagaaagaagcggctcttcaatctgtcatgaatgaattagaggccgtaacagaccgcctgacacgagggcaaaacagacagacagaattgaaacagcagctcaaatccctgcaggtgacatccgatgagcgaaaaagctgccagcaggccgcagaaatggcattgcgcatcagacaaaccgaggagcaaatcaaaaaagagaaaaaacgaagtgaagaattgaacctcgtgctgcagaagatgaatgaagagaagaatacactcgttcaaaagacggaagcggaagaaaacaacatcattcaggcatatgaggctgtacaaactgtgtaccatttggtgtgcgaaacggaacgctcattaacacatatgacggaagaggctagaaagagtcaacacacgcttcacttacagcgtgaaaaagcaagggtggcactgctgacaaaagagttagcccaaaagctgactgccggtaagccttgcccggtatgcggttcaaccgatcatgatccatctgcctcagtacatgaaacatatgaagccgacagccatcttgaagaggacattaaacggacagatgtattattgacggaagctgcagctctcagccaggagattctttcagccaaaattacgcttgaagaacagtccgcgcgctttattgaacagtgtccgtttttgcagacaattcaagcacagaaccttgaagcggcagcttccttcgaacatcagccggtgtatgaagcatttgaaactgccaaatttgaatggaaacgaatcaagcaggacattctttctgttaagacacgaatggcacaaatgattggcgcctatcaggagtctttaaaaaaggccgagcagcttaatgaaaaaatcggttttgaaaaaagagaagctgaccgtattgaaagcatcatcagcgagcttcaatcctcaatggacagcagtctgaatatgtttaaagaagcatttcagaatcaatctgtggacgaagcagaaaaatggcagcaagccattgaagaaaaggaccgggctgcagaagaatgtgaaaaacgaattgagaagagtatcgcgtttcttgctgagcatgaagcacaaaaggaaaaactgcgggaatctggacaccggcttgaacgggaaaagctggagcttcattatgcggctgaacgcatcaagagcgtgatagctgattatgagcacgaactcggagattatgcaaaaggagattcgattcaaatcaaactccgctctgtccagcaggatctaaagctgttaaaggaaaaagaacaatctttatatgaagaactgcaaagcgcccaaatgaagctcaaccaagcgaaaagccgcgcttcggcaagcgagctcactcttcaagaggcgaagggcagattggaaaaagcaaaagctgcttggcttgagcatacaaaaaacacctccattacccggactgaggaggttgaacaaagtctcatcccagctgatgaacttgaaaagatgaaaaccggcatagaccagtttatggataaactgaagcaaaatgctgcaaacttaaaacgagtagcagagatacttgccggcagagcattatcagagagcgaatggaacgaaaccgttgcagcattacaaaaagctgaggacgcatttggcgctgctatagaggaaaaaggcgcggcagcaaaagcactggctgtcattcgcgaccatcataaacggtttaatgaaattgaagctgaactgaaaaaatggcagacgcatatcgacaggctggacaagctgcaagctgtgtttaaaggcaataccttcgttgaatttttagctgaggagcagcttgaaagcgttgcgagggacgcctcagcaagactcagtatgctgacaagacagcgctatgccatcgaagtagattcagaaggcggcttcgtgatgcgggatgacgcgaatggaggcgtaagacgcccggtttccagtttgtctggaggagagaccttcctcacctcgctttcacttgctcttgcgctgtctgctcagattcagcttcgcggggaatacccgctgcagttctttttcttagatgaaggcttcggcacactggatcaagatctgcttgatacggttgtaacggccttggaaaaacttcagtcagacaatctggctgtcggtgtcatcagccatgtgcaggaactgcgtgcacggcttccgaaaaagctgatcgtccatccggctgaaccgagcggccgcggtacgcgggtatcacttgagttgatgtaagggaggagcggatatggcaaagcagactgccggaatatgtgagctgtgcggccggagcgatgtccagctgacagagcatcatctcacaccgaaagaggaaggcggaacgtttttgccgacagcgatgctctgtattccttgtcataaacagattcatgccttatataccaatcaagagctcgccgtacgtttaaacggaatggctgaactcagaagcgatccagagcttgcccggtttgtcaaatggatcagaaaacagccgcctgagaagctgatcaaaacaaagaaatcaaatgaacgaaaaaagaaaaaatgactaaaaagcagccctctctttgcagagcggctgcttttatccgtttccaaccatatcctgatcgttgacatcggggtctatataatttgtcgcgttgactgcattatttaatagaaggaaatctcccgtgtttcctgctcccgaaccgagcgcagattttgaagagcttttcggagaaaggtaaaaggaatcaccaaagtttacgactccgcccgatatggaattgatagctataggcccgacaattgctggcataaacgacaccctttatcgaagtctctgtttattatatgttcttggcgggcgattgtgagcgcggagactgaatctgtctgatatgtttgagtctcgcatcaccgcgaataagcgaagctgatccggcatgtaaaacagaagaggctgagaccccttgaattttgatgctgcgaacataaatagccggcacctcgtggcaaaacgcgctttgtacacctgtttcggggagcggcttcacagcctgctgctgaaagatctgatactcctttttgttaaatgagccttcattatggtaaaacgtggacagagaacgctgcacagcaaatacttttacactcatatcgatttcatttgtgtcgccaacttgaaacacacttgcgatcccgagggaattaaacttaactagtctgatgcgcgatatgcgtttaagcattattctggcgcaagcggagcaaacggcccaataataagagattcaggcggtgtatcaaaaatagaagacaggtaaatggattcagtgtctccgatgtggaaaacggaggaactggacacaccgttcatccggatgtccccgacttctaagctgcggttgatgactgtaaagatcatgcttgctcatctcctttcatttctgatggaatatgctccagaaagtgttctacagcgcggatgacatcacgcttcacatgctcagcgatatgttctgcatattgtgcaggcggtgtatgttcttcttttttgatatgggacatataataatggattcggctgtccatttgttttctgatgtcttcaataacatgatgtctgtttgtatcgtcaagtctgctgtcatattggttttcaagctgttccaaaatatctgggatttcctcggttaagtacatgtcgacattctggcggatctgctgcatgagctgagcgctctcttcctgctgcatcatcccgatttgcggtgtcgactggctgacgtcaaagttttggacgctgttcgggtcagtcggatttaaaccgatgttcaaagtcccgtcgagcctttcgattttcagctgatcaaatttatactccacacgctcaatggtagtggccggccgctgtttcatcgtattcatttcagtttgaatctctttcagctgacgttcgagctgctgaatgtgaatcgcctgctgctgaacgaaggaattcaagttttgcaggtaagaggaaacagattgatcatacatgttcttcacctctttcatatgattaacggccaggaggctggagcgggaccaatgaacctgtgtcgggctcctgcagctggagcggttgccctgagccagaaacttctggtgccggttctacatagcttcctgtattatacaaatttgacagtgacttgattgatccggcgctcccgatttgcagaatggaggagttgctgattgattccagccggagatagttgatttgaatggtttgattaatatagaagttcatgagcctcactccttttacgcattggccacgatcggctgatcaaccgcatcattgtcatacacattcgtcgcgttttgataattcatcaccttgaggctgtcgccggtattaaagctgccagcaccggcaaacgttctgacctgagcctgaggagaaatcgtaatgcagtccccgatgtgaacgactccgctcgtaccaatcgcattaattttaaacgctccgacaatggccggcatacgagcacatcctttgttgaaaaattaaaaaaagacaggtaaagtgaaatgacaattctgatttcaattgggctattcacgatagcttatgacaaacgcacatatgtgtgagagaaatttaaaggggacatatcggctctttatgaaagcgctttattttttcgggccgttatgtttaaacatggcaaaagaggatgttgggtataaattgagcggaaatgcggcgaaggatgccgctatccgcctatggtgatttttgtttatttctttggtgtttttgcgtgtagaatgctttttggagtatgtcgtgctgcggtattcgatttttgggcgggcacattctcgccctgaggtatatcccagaagtgctgagcaaaaagcggagttacatgtggtgtattctaattgttatagaaaatgatttacatacgggagttttcaagatatctcccaaaaatcatttcttctttaatccgggtattcagcaggatatccagctcttggctgcattgaatcgtttcttttgaattcatgccatatttttgtgcggtttcaattagtgtgatcctcatttcttcaattttactgttcattacgctatctccaattctagattttattttgatataaatacaggatatcgttagtataacctattttggctcaaaaggttgcctttcgtcaatttgactaaaaaagcgacaatttttgctgcggccttttttaatggagaaaggactaaagtcttgctaagtgtgcttgcaaaaagtcctgccgttcctcaatttctctaagtatgttggtctgctccttttcgatttgaaaggggctttttttgataaaaggatcatcagcagcactttgacaaatgtcaaggtgccattcgttgatgagaggagataatcgttcaatagtaaacgaccgcttcagcacgtttttcattaaggtgtgatattgcgacctgaaggcgggaatggatagaagccttgacgaaagcgtctttccttttgtcagaagcgggtcttcttcataccattcttgtacggcaagcgatcttgtctccatcggggaaacgtaaagccgaccggattcgtttaaacaaaatgtgtagtaaaagccttgattggtgcaggcgttgccgatcagccacaaaaaaaacagcttgacatccagatacaatttaatcctttcagccaattcgtcatctccggctgtgcggatcagtatgaaaaattcatgtaagaatgccgagaaatcattgttaaaaagggacaatggaacccttggatcggccgtcttcactccgtaactccttttaccggctggctgatggttcttgatgttcaaataaatgccttcaggctggccattgatggtcagaaagctgtacgaggcaacgggagcaggtacgccgatctggtcaaaaaaacaataggcgagtctgcgccgcatcagggacggatcatcctgttctgcattcaaaaaaagtgtcctttcaccaagcagagacttttcccagctgatttcataggatgccttttccgctctgtcacgctgtgtgagaagaatgggagaaacagatcgatctgttacgaaaagccccttggctgtacctttccttttcagctgctcccgatgaaaaaataaatgcacgcgctccatattctttcctccttctcaaaacgacatttgtatgatatgtagagcaagcccgtcctgaaacgaaatgaaaacggaaaggagaaaaagggatttcagcattcgacagagaatacatgaaggagcattctgatttaaaagatgatggaggaataacatgaaatttgcgacaggggaactttacaaccgaatgtttgtcggcctgatcattgacgatgagaaaattatggatttgcaaaaggctgaaaaaaaactgtttgaacttgagacgattccgggatcgctgattgaatgtatcgcagaaggggataaattcgttgcgcatgcaaggcagctggccgagtgggcaaagaaaccgaatgatgagctgggatcatttatgtattcattatctgaggtgaagctccatgcacccattccgaagccatcaaaaaatatcatctgcatcggcaaaaactaccgggatcacgcgattgaaatggggagcgaggctgatattccggagcatccgatggtatttacaaaatcgccggtaacggttacggggcatggtgatatcgtaaagagccatgaagaggttacctcccagcttgattatgagggagaacttgctgtcgtgatcggaaaaagcgggacccgcatttcaaaagaagatgcatatgaccatgttttcggatatacgattgtgaatgatatcacggcgcgtgatctgcaaaaaaggcataagcagttttttatcggaaaaagcttggatacgacatgtccgatggggcccgtgcttgtacataaatcatctattcaggagccagagcgcctcaaggttgaaacaagagtcaacggcgagctgcgtcaatccggttcggcaagcgatatgatcttttccattccggaattaattgaaaccctctcaaaggggatgacgcttgaagcgggcgacattattgccaccggtacgccatctggtgtcggcaaggggtttactcctccaaaattcttgcggtcaggtgacaaaattgatattacaattgatccgatcggaacgctgtcaaaccaaattggctgaataaaactggagggcggacccggacccgcccgttttttctgataatcatctttgtggcagaggacaagttcatggtactataagtggggtaatttatctgatagggggaacatatatgacacacctacatattacgacatgggtggtagcgctgattctgcttttcgtcagctactcgctgtattcgtcaggaagtgcaaagggcgcaaaaatcactcatatgattctgcggttattctatatccttattattttgacaggagctgagctgtttgtccgtttcgccaactggaacggagaatacgccggcaaaatgattctgggcattatcaccatcggcctgatggaaatgctgctcatccgcaagaaaaaagaaaaatcaacaggaggcctgtgggtcggcttcgtcattgtccttttgctgacagtgctgctcggtctgcatttgccaattggttttcaattgttttaatagaaaaacctatgaacccggctctttgatagagttgggtttttttatatttatcccctcatattccaaatcatttaaaataaccttaaaattccctgtaagcggtatctcgtcctatgaaattatgataccttcaaggagattcattattttgcaggagggataacatgaaacgcagaaaattcagctcggttgtggcggcagtgcttatttttgcactgattttcagccttttttctccgggaaccaaagctgcagcggccggcgcgatcgatcaggcggctgctctggaaaacggcaaagagcagacaggcgccatgaaggagccggaacaggtgaaatggtacaaagtgaccccgggagcaacggatattcagaaaaactcacatatggcactgaccgtaaagagtgattcagtactgaatgtatctgtatatccaagtaaggaaaaagcgcttaaagatgagacgtttgagatgtaccgttctttcacagcggaggatggaaaaagcgaagtcatttttccatacgcgtggagcggcccttactatgtaaaagttgaatacctcggagaagaagagccagaggacggcggaacggcagaagcagctgcagaagccaagtatacgattgggtataaaggcaccaaaaaacagccgtcagatttagaagaggaagaagcttgtccggttgaaatgagtgtcgatcagaagaaatcaggaaaaggcatcctggataagctgagagcgattcgtgatgagcagctgagccaaacagcagaaggcaaagaactgacaagcctttattacaaagcagcaccgtttatcgttgcaaagctcgcactcaataaaacagcaagaaatgaaatctatcaggatcttgtgacattaaagccgttatttgacgatgtgtcagaaaacggagcatcatcttcgcataaggtcactgaaaaggatcaaaaagcaatcaaccggctatatgataaagctttacaatcagtcccgtcattccttaaagaggagataaagaaacaagcggaccgactaaatatgaagcagctgcaaggcaaaacagccggagccattttaacagaaaaccatattgcagcaaaaagtgaagttcagacaacaaaggttattttcaaggtgaaggacaataaaagcctctcatccgtacataatgaaatgaagggcttttctgcaagcgcgcaatcgaaaaaagacatatccaatgtgaaaaaggcaaagaaactgtttgacaatctgtattcatttgaacttccgaaagatgagaaacagaacggcgcatatacggcaagcgccaaaagggtcaaaagcgctgctgcgacactatccaagatgtccaatgtagagtttgcggaacccgtgcaggaatacaaaagcctggcaaacgacattcagtacccttatcaatggccgcttaaaaacaacggtgaaaacgggggtgtcaaaaatgcggatgtgaaatatgagcctgccaacacattgctgtccaaacgcaagcttaacgatacactcattgcagtagtagacacaggcgtagacagcacgcttgctgatttaaaaggaaaagtaagaacagatctcggacacaattttgtcggacggaataacaatgcaatggatgatcaggggcatgggacgcatgtcgcaggcattattgcggcccaaagcgataacggctattcaatgactggattgaatgccaaagcaaaaatcatcccggtaaaagtgcttgattccgcaggttccggagatactgaacaaattgctctcggcatcaaatatgctgctgacaaaggagcaaaggtgattaatttaagtttaggcggaggctacagccgcgtgcttgaatttgctttgaagtacgcagctgacaaaaatgtcttgattgccgcagccagcgggaatgatggagaaaatgccttatcttatccagcatcttctaaatatgtgatgtcagtcggcgcaacgaaccgcatggatatgaccgctgatttctctaactatggaaaaggtctggacatctctgctccagggtctgatatcccgagcttagtaccgaacggaaatgtcacgtacatgagcggaacgtctatggcgacgccgtatgctgccgctgctgcaggattgctgtttgctcaaaatcctaagctgaaaagaacagaagttgaggatatgttgaaaaagacggcagatgacatttcctttgaaagtgtcgatggcggagaagaagagttgtatgacgattatggcgatccgattgaaattccgaagacacctggtgtagactggcattcaggctacgggcggctgaatgtcatgaaggctgtcagcgcagctgatttacagcttaaggtcaacaagctggaaagcactcaaacagctgtcagaggaaacgcgaaggaaggcacacttatcgaggtgatgaacggcaaaaagaaactcggcagcgccaaagccggaaaagacaatgcgttcaaggtcaatatcgcgactcaaaaacaggatcaagtactgtatgtgaaagcaacaaaaggcgatgcgaaaacatcgtataaagttgtcgtcgtcaaaggaaaaccttccggcacaccgaaagtaaacgcggtgaaaacgaaggatacggcagtaaaagggaaggcaaacagcaaagcgatgatcagagtgaaaaacaaatcaaagaaagtcattgcttctgccaaagctgacgcaaaaggaacgttttcggtgaaaatcaaaaaacaaaaagccggaacggtgctgtacgtcacggctgcggatacagataaaaaagaaagcaaggaagcaaaagtggttgttgaaaagtaaccaaaaagcggtgctcgatgcaccgcttttttatttgcgcccccgttggactgctgaatacataatggatcgctttccgtttgaagccgtccattcaaaacggtctcctgtcccttcgctgctgtagtgatgctgcatcgcgcattgtgcggtgtcatttgaaaagtgataaaaggacacaccctgccccgccgaagtatccgaaaagactcctttattataagaaaagacgcaatcgaataccgataagccgaagctgtgcaagtgctgcagaaatgcgagaaaggtttcgtcgtcaagcgaatccaaaagcgccatgagaggccgcttgactgatttctcatagcggatgcgttctccgccggaaagggagatgttttctgcaccgcatgccaaaaccaacttgtcctgaaagccggcttgctcccactttcctttatgatggacccagattgggctgtgttggagactgtccgccagcagtatatcgccttcaccgttttcgattaagcagatgccgtcttcaatgaggatggtgccgtattcccactttcgttcctctgtatataacaattgtttccgtttcatccatgctgtctcctttttcttcattcctctcttttctttccaattcaagcctgtcccatacaactcttttatggacaaatcaactatctgcctatagatgcataaacttactaaggtgctgaaagaaacgaaattgttacgaaagaaacgggattggagctgatgtcacatgtgtggaattacgggttgggtcgattttaaaaagcagctcgtccaggaaaaacaaacgatggacagaatgacagacactctttccaaacgagggcctgatgattcaaacgtttggggggagcaccatgttttattcggacataaaagacttgcggttgttgatattgaaggcggacgccagccgatggcgtgtacctataaaggggatacgtacaccattatttacaatggcgagctttataacacggaagatttgcgcaaagaattgcgggcgcggggccatcaattcgagcgtacgtcagataccgaggtgcttctgcacagctacatcgagtggcaggaagactgtgtcgaccatctcaatggcatattcgctttcgctgtgtgggatgaaaagcgtaatctgctgtttgccgcgagagaccgtctcggcgtaaagccgtttttttacacgaaggaaggctcttcatttctcttcggttcggaaatcaaagcaatcctcgcgcaccctgatataaaagcgagagtggacagaacgggactttctgaaattttcggtcttggaccgtccagaaccccgggcactggcatatttaaaggcataaaagaaatccgcccggctcacgcgctgacattttccaaagacggacttaatatttggcgttattggaatgttgaaagcgaaaaacatacggacagttttgatgacacggttgccaatgtcagatcgttatttcaggacgcggtgacgcggcagcttgtgtcggatgtgccggtttgcacattcctatcaggcggtctggactcaagcgcaattacagcgattgcggcgggccattttgaaaaggaaggaaaagcaccgcttcatacttattcgattgattacgaagagaacgataaattttttcaagcaagcgcttttcagccgaatgatgacggaccatggattgaaaaaatgacagaggctttcggcacaacgcaccacaaatgcgtcatcagccaaaaagatctcgttgatcatttggaggaagctgtactggtcaaagacttgccgggaatggcggatgtcgactcatccctgctgtggttttgccgggaaatcaaaaaggactttgtcgtcagcctatcgggagagtgcgcggatgagattttcggcgggtacccgtggttccatacggcagatgttgagtctggctttccatggatgagatcaacggaggagcggatcaagctgctttctgactcatggcagaaaaaattgaatctgaaagaatacgtaaatgccaaatatgaagaaaccttggcagaaacgccattattagacggagaaacgggtgtggataaagcaagaagacagctgttctatttaaatatgctttggtttatgacgaaccttttggatcggaaggatcgcatgagcatgggggcgagcctggaagtgcgggtgccgttcgccgatcaccggcttgtggaatatgtttggaatattccgtgggaaatgaaaatgcatgataatcgggaaaaaggcattttacgcaaagcgcttgaaggtattttgcctgatgacattctgtatcgcaaaaaaagcccgtatccgaaaacacatcatccggaatatacaaaaggcgtcagcgaatggctgaaaacgatcagaagccaaaaggactccgtgctccataccttgctggacagaaaacaattagatcagcttttagaaacggaaggctcctctttcaaggtgccgtggttcgggcagctcatgaaggggcctcagctgatcgcccatcttgctcaaattcatacatggtttgaagcgtatcgcattgatattgacgagaggtaggttcaatgcaaatgtgattaaaagccagagatgtatagatttaaataagaaggatagatgagcagggaaatatatgctctatctatccttttttgtacaacagcactatcgaattgcccccgcattccttcaataagaatgaataggttttaatgttctgccgataaaactagctgataccgggcttaactttaattccctagcccatacagaaagttgaccaatatggtgaatttcgtgagcgatgatatggtgtaatatttcatctcgcgtatataaaacacttgtctcccaaggaacgcttacaagttcatcttttatttgatctgaatgtgtttgtaaaacatcaattatttcagttcggaatgtatttgagagagatttcactttattgagtgtttgataatcagcgaactgaacagcgatatcttcttttccttggatagcacgaatccaactatattccacatcaataatatgaaaaagggtatataaaatattctctactccgccaagacggtttttaagtaattcttcagtggttagttgatgacaccaagtaaaccattgatctctaacctgccagttatattcaaaaaattttatcactgaactcactccaatactatcatgtatcataacaattagcccttttttccgtgattcctctattattgaagtgatgattgagaaatgtttacattctacctgttgtatggcattaaaaataataatgcatatctcgtcgatgatgctgtgcgtcttgttacttttacaaagtaagaatcggcattttcttcatatacaattaggaaaaaacatactagacttgaagaagcagtgatacataggagtgagaaaatgaaagagataaaagaagcttaccagcaatgcggacagattgttggcgaatacgcgccagcctgtttcaaagcattatcatatctcccgctaaagcaaagacaagcctcttgggcagtattgtcgttttgccacacggcggccagtgcagacgaaaaggtattgcccgcatttgaagctaaagctgatcatgtttaccaaaggacaaataacggtaaacaacatctatggaaggcttttgatcatgcgtatcggacctttacattggaaagcgaaccttttcgggagtttattgccgcacaaaaagaagacgccaagccgtatgatgaccttgatgaactgctcatgtacgcatatcggacgggcggtgctgccggattgatgctgctgccgatactgacacgccgaaaacaagatcagctcaaacaagcagccgtctctctcggcttggccatacagctggttcgcttcttaagtgatcttggcacagatcagcaaaaaaaccgcattccccgtcaggtaatgcagcaattcggctatacagaggctgatctccaaaaaggcaccgtaaataaagcgttcacaatgacgtgggagtatatcgcttttgaagcagaagcctaccttgaagagtgtcaggatgccttgccgctatttccgcagtattctcaaaaaacggtgaaagccgctcttcatttgcaccgggctgttttagaaaaaatccgggcgaagcagcacgatgtatttcaatatcacttcgctctcacagagaccgaagtgaagcagattctgtctgatatctaaaaaacacccggccttgattgagccgggtgttacgccatacctttttgaatccagatacgtgagcgccatcttctgtacattaagattccccggacccattcatccgcgataaaagaaatccaaatgccggcaagaccgaaaccgaggtggatgccgaaaagataagcaagcgggaggccgatgccccacattgaaatcattgccatgtaaaccgggaatttcgcatcccccgcagcccgcagagagttaatgataatgacattaaacgagcggcctggttcaagaataatggtcatggcaatcaataggcttgcagttgctataatgtcagggctttgtgtgaagagtccgatcaggtcttttgaaaagatcgtcatcaaaacagaggtagccgcagcaattccgagtgcccaatataagctcttcatgcagcgctcataagcggcatcaaattgtttgccgccgatataacggccgattaagatttgtgtaccctggctgatcgcagtgccgaacagcaaaataaacatcgtaatattttgcgtatacacttttgttgtcaacgcctgcgcgcccatgatggcgataaaatacgtgacaatcatttgcgaaaggttgtatgaaagctgctctcccgcagaaggaatgccgattttcagcagcttgcgcaaatgctctttatgcatatgaaagacttttttcagcgacatcttcagctggatgcgtttgttgacaatcacaatcatcgcgattaatccgatgacgcgggcgatagatgtggacatggccacaccggtaacgccgagaacaggaaagccgaacaaaccgaaaatcacaacaaagtttccggcaatgtttaaaatgttcatgccgatagtgacaaacattgtatcttttgtgtagccgtagctttttaagatcgcgctgaatgtcatgattaaagcctgaataaaggacagacctccgacaacttgtaaaaagactttcgcatcaggcatcagtgcgtctgataatcccatcatatgaagcagagggacagccgcgaaaaagacgacggcgctgatggccaggctgatgaagaagttggcgccgattgacacataagcgacttccatggcttctttcttttgccgtgagcctagaaattgtgaaatgataacggtcgttcctgttgcgataaagctgaacatcacgataattaaatttaaaatctggttgctgacgccgactgctgccacgctgttatccgagtattggctgagcatcagtgtatcggcattacccataaacatatataatgagacctcaataaagatcggccaagtaagcgaaaataatgagaacgttttgtcagcgggttttttcaaagcagttgatttgaagacagcttgtttcatagtgtctaacccctttcgtaaataaaatcaacgttttaaagtgtacctccatttccttataataaaaagggatagaaacgatacttcttgtaaaaatccgacttaaaaaggaggatgattcaaatgccccgcatcctgtttacagtcccgccttttccggtatttattgcagctggggaaggggtttttaaaaaaggagaaacccatgtgaaacgtgtattctccgtgtttgatctgatatatgtcaaacagggaacgttatatataacggaaaatgaaacatcgttttctgttgaaggcggcgagtacatcttgctttctcccggtcttgaacactacgggacgaagggcagtgatgaagcaacctcctactattggcttcacttcgatgaacatcgatatgaatttacggcaaagggaggcagcaactggtctgagcttcagcaggaaaaagggagcttcgaagagccggcccgctacggattggctttgccgagaaaaggcaaggtgcagcgcccgcagtttatggcgcagcagtttgaaaagctgatcgattactccgcggaaaactctgatttgcccctcagaaagcaaatcttatttgaggagctgatgctgcatcttcaaaaagaagcgttccaaataccgtctgcgaaagagcgggtagcctgggaggcggcccggtacttacaggagcactataaggaaaagacgacaatcaaggatctgtcgctcgcccttcactatcatcaggattatgtgagccgctgcatgcagcaggtgctcggcgtaactccggcacaatacacgaaccgggtgagaatgacggaagcgaagcgtcttttatcctctacaaatgataaaatgggcgttattgcggaaacggtcggaatggaagatccgacatacttttcaaaactctttaagcagatagaaggcatttcaccaattgaataccggaaaattgtcagccggaaagttcaataaccagacgagggatgaacatgaaaacaacaatttacgatgtggcaaaggcggcgggtgtctcgatcacaactgtgtcccgtgtgataaacaatacggggagaatcagcgataaaacacggcagaaggtcatgaatgtcatgaatgaaatggcatacacgcccaatgttcacgccgcggcgttaacgggaaaacgaacgaatatgattgctctcgtggcgcctgatatttcaaatccgttttacggcgaactggccaaaagcattgaggaaagagcggatgagctcggttttcaaatgttgatttgcagcaccgattacgatccgaaaaaagaaacaaagtatttttctgtgctgaaacagaaaaaggtggatggcattatttttgcaacagggattgaaagccatgacagtatgtctgctttggaggaaatcgccagtgaacaaattccgattgccatgatttctcaggataagccgcttcttccgatggatattgttgtgatagatgacgttcgtggcggatatgaggctgccaagcatcttctgtcactcggccacacgaacatcgcctgcattattggagacgggtcaacgacaggcgaaaaaaatagaatcaaaggcttccgtcaggcgatggaggaagcgggcgtgcccattgatgaatcacttatcatccagacgcggttttccttggaaagcggcaaggaagaagcgggaaaattgctcgacagaaacgctccgactgctatttttgccttcaacgacgtattggcttgtgccgccatacaagctgcgagaataagaggcataaaagtgccggatgatctttctatcattggttttgataatacgatactcgcagaaatggcggctccgcccctgacaaccgtagcccagccgataaaagagatggggcggagcgtcatcgaactgctggcagaagcaatagagggaaaacgaaaggcgaaacaaaaaatagtgctcccgcctgagcttgtagtcagacattctacatcaccgctcaacacatgagcccgctaatgagcgggttttttcattatgacagttgaagccaaaaaaacatattgcgtgtaaaccaaaggcagtgtaaaatgaaaccatcttttgagaaagcgcttgcgcaaaatggcagagcggatagaaccgctgtttttttagctgttaagagaaagcgctttcccaaagcgagcccgaaatgagataaaggagaggatgggacgtggaacatcaagtaaggtgcgcagtattgggattaggaaggctcggttattatcatgcgaaaaatctcgtcaccagtgtgccgggggcaaagctggtttgtgtcggtgatccgttaaaagggagagcggagcaggttgccagagaactcggtatcgaaaaatggtcagaggacccgtatgaagtgttagaagataccggcattgacgctgtcattatcgtaacgccgacaagcacacatggtgatatgatcatcaaagctgccgagaacggcaaacagatctttgttgaaaaaccgctgacattaagccttgaggaatctagagcagtttctgaaaaagtgcaggagacaggtgtcatctgccaagtcggctttatgagacggttcgatccagcatacgcagatgccaaacggcggatcgacgctggagaaatcggcaaacctatctattataaaggctttacgcgcgaccaaggcgcgcctcccgcagaatttatcaaacacagcggtgggatttttatcgactgttccatccatgactatgatattgcccgttatttgctaggggcggaaattacttctgtttcaggacacggcaggattctgaacaatccgtttatggagcagtacggcgatgtggatcaggcgctgacgtatattgaatttgactccggcgcagcgggggacgtcgaggcaagcagaacctctccatatggacatgacattcgggcggaggtgatcgggacagagggcagtattttcatagggacattgagacatcaacatgtgaccatcctatcggctaaagggagcagttttgatatcattccagactttcaaactcgttttcatgaagcctactgcttggagcttcagcatttcgccgagtgtgtccggaatggaaaaacaccgattgtgacagatattgatgcgacgatcaatttagaagtgggtatcgccgcaaccaattcctttcgaatcggcaggccggtacagctagatgtgaagcacgcttatacaggtatgtaaaagctaaatatgttgcattttaggctttccgcaaaaaaaagcaaggacatttttagcccttgctttctcttttctcatataaatagtacatataatcagtaggtatgcctgaatggcccagctgtctcagcatggcggttacgttacctctatggtaagtcccgtgattgacgacatgcaggatggtgtctgcataggttgattccagtgtacctagtttcggatgctgcattgtgaaggtctgttctaagtccgtctggcggctgaagaaatcatgatactgtgactccagctcggcagcgtgctgtttaatcgctgccatattaccttgcgcggactctaatttgcctgcgctgtctataatctcttggtaggccactcccgaaagaacattcagccaaatgtagtcagccctgcacatatgaagcagcacgtcgctgacagaaggaaatacgctctttacttcttgataggcagtttcctccggcaggttttcgatatgggtaaatattttcttgtttgcccaagaatgatagtcataaaactgttttgcatcagtcatcagcatgcccccttttctaagaaattcgtttttttcatctgtttctccttcaattgcaaaagagtgacaccccaaaatatcctgccgctgcccacataaccgctgcagagcatttgtttacgatcagcataagcctgccgctcgtatctatcgtctgaaacaaccggcccgctattgcaaggctgataaaccaaatccaagacacagcgatgcaggcggccataaagagccatttctcaagccccgaatattgaagagagctcgtgccgatgacgccgatcgtgtccagaatggcatgcgggtttaaaagagaaacagcggccgcaaacgcagcttgcttttttggtgtgaacgtatgtttctcattttggcttgtgttcggacggctgttccaagtcacccagcccatataaagcaaaaataaaaatccgccggccatcatgactgtctcaaacacaggcagctcctgcacaatgacagacacgcccgcaacggctaatacgattaacagggtatcgcagactgaagcactgatgacagctgggagagcccgccaaatatgcttttgccacgcgccttgctgaaaaataaacacattctgcactcccagcggcaaaattaagccaaacgcgagcacaattccgtgaatgattgcattcatgctgaaaaagctcccttcacatttttttcaatcataagagagattgtcactaaagtctccagccatttggttgggttagaaaccagccaaatgtataatgtgtaaaaaaggggggcatgaccttgtcgcaatggcagccaagccgaaagtcggatgttccgctgcatcggcagatcgaacaatatatgaaagacaagattcttcacggagagtgggctgtagggacgaaaatcccctcacagagaacgctggccggcatgtttcaagtcaaccgcagcacagtcacagcagccatagatgaactcacgtctcaaggcttgttagagggaagaagaggcggcggtacgaaggttgtaaacagtacttggagcgtgctggcggctgagcctccgcttgattggagcgattacgtccgttcgggcattcatcgcgccaattcttccatcattcaagctattaatcagaacgaaccaagagcggatatcatcagattaggaactggagaactttcaccggatcttgtgcctgctgacacaattggacggatgtttcagcaaatcaatccgggcgccctgtctttaggatatgagcagccgaaaggaaaccgtcagctgcgggaggcagtagccgaccatttaaaaggaaagaagatccatgtgtcaccgtctgcaattttaattgtgtccggtgcacttcaggcacttcagctcatctcaattggacttttaaaacgagattctgtcattttgacggagaagccgtcctaccttcaatccttgcatgtatttcaatcagctgggatgcggcttcgcggcttgccgatggatgatgaaggggtcaaagcggggcttgtttcttctaatcgaaaacaatatggaggacagctgctttacacgattccgtcgtttcataatccgacaggcacagtcatgtcagagcagcgaaggaaagagatcatcagcctgtcaaaaaaagagcagctgcccatcattgaggatgatgcgtacggtgatttatggtttgaagaaaaaccgccgcagccgttgaaagcaatggatcatgagggcaatattctgtatctgggcacgttttcaaaaacggttagccccggtctgcgaatcggctggcttgccggtccggagccggttattgaaaggctggcggacattaaaatgcagacagactacggatcaagcggcctgtcccagtgggcggctgccgagtggctgtcacaggggtattatgaagagcatctgacttgggtacgcaggaagcttaaagaaaggagagacgcagccgttcattttctcgagcggtatgccggggacattgccacgtggcggattcccgcaggcggcttttatatttgggtgacatttcacaaaaacctgcctgtcagccgtttcttttatggattgctgaaacggcaggtgcttgtgaatcccggctacatttatgacggtgaagaccgaaacagcatcaggctgtcatattcctatgcatctcttggagatttggaaactggcattaaagcggcagctgaaacagcacgctgcctgatgatgtcctaagctttggttatacgatgacagctcccagtgccctggcgaaggcaatcgcgtgctcaggtgcgattttgcagcctttcaatttgtcgagggagacatgaagctgttcaaaacggcacgtgctgatgtccatgttttgaagggatgtgccggtaaagctggcgccttccaattcgcatccgtcaaagtgtgtctgctggagcaccgtattgctgcattcactttgcataagagcacagtgatcaaatcgaacttgtttcatatttgagtacgaaaatgagctgaaatgtccgtggcattcctcgaatgaaacatttcgcagcgttgcttccgccacattcattccaaccatttttgactgcttaacagaagttctgtgaatgacagccccgctgaaatcggcgtttgataaatcacatttttcaaagatcacatcggtcagttcaatatgccgaaaagacacatcgataaagacgacatttctgaataccgttttttcaacacagagtctttcgatatcttcgccgcagattgtacaatcttcaaacaaatgcatgctgattacatcatcctgcgtcacggcatcatgaaaatctgcggtttgcaggttttccggtatgttcggtttttgaattgcgattttattcatgtgatgacatcctttgctgcccgaaaaacagaggcttccgggttcaatttaatagatcgttaaggaaattgatacatatagtaaatcgtgaagagccttttcttggtacagcagccagcttgttttgtaagcataaatggaaagcttcctatacgtcaaggcgtttacaggccgggaaagccaaagggaacaggaggaatgcggaatggggcattacatcaaaaccgaggagcatgtgacactgtttgtagaggatatcggacatggaaggccgatcatctttttgcacgggtggccgttgaatcataagatgtttgaatatcaaatgaatgagcttccgaaaaggggatttcgttttatcggcgttgatttacggggatatgggcaatctgaccgcccttgggaaggctacgattatgacacgatggccgatgatgtgaaagcagtcatttatacgctgcagcttgagaatgcgattcttgccggtttttcaatgggcggcgccattgcaatccgttatatggcaaggcatgaaggagccgatgttgataagctgattttactgtctgcggcggcccccgcgtttacaaaacgcccgggttatccgtacgggatgaggaagcaggatattgacgatatgattgaattgttcaaagctgatcggcccaaaacactggctgatttagggaaacagttttttgagaaaaaagtgtctccagagcttagacagtggtttctcaatctgatgctggaggcctcctcctacgggacgatccactcgggcatcgcattaagagacgaagatctcagaaaggaacttgctgcaatcaaggtgccgacgctgatcctgcacgggagaaaggatagaattgcgccgtttgattttgcgaaagaattgaagcgcggcatcaaacagtcggaattggttccgtttgcaaacagcgggcacggagcattttatgaggaaaaagagaagatcaacagtttgattgcgcagttctccaactcataagaaaaaacccgacattgatcgggttttttatataattcctctgttttgcagtgcgttaatgatgagatcagctccatcggaaatagaggtctggtctgactcaatgatgaaatcgggtgaaagcggcgcttcatacggagaatcgatcccggtgaaatgtttgatctctccgtttcgcgcttttttataaagcccttttggatcgcgctgttcacaaacatgcagcgggcacttcacataaatttcgaagaactcacctttaggaaagagcgctctaaccatgtcccgatcctctctgaatggagaaataaaagccgttaaaatcatttgcccgctgtcgacaaacagcttcgccacttctccgatccggcggatgttttcaatcctgtcaccagtctgaaatccaagatctttgtttaagccgtggcggatattatcaccgtcaagcacgtagctctgaatgcccttgcggtaaagcttttcatcgacagcattggccagcaccgattttccggagccggacaaacctgtaaaccaaaggacgcagcttttgtgtccgtttaaggactgtctgtcagactttgagatggcagcgggatgccaaatgatgttcggattgtgtgtcattgcaattccccgctgttttgcttgatggcaacaggctgttggtgaagtcccttgatcagcacggctgcgacctcaggccggctgaattctttaggcggctttttgccttggcggagaagctctctcacttttgtgcctgataagtggatgtggtctctcgggctgtgcggacatgttttggaggtgcccatgtttccgcattttcggcaataaaagctgtgctcaaaaaacagcggcttgatgcccagctcttcctctgtgaatgattgaaaaatattttgggcgtcgtatgttccatagtagctgccgacacccgcgtgatcacggcctacaataaaatgggtgcagccgtaattttttcggacgagcgcatggaaaatcgcttcccgcggacctgcataacgcatggcggcagggaaaaccgataacatgacacgatcctttggataatagtgattaagcaaagcctggtagctctccattctgatatcgctggggatatcgtctgactttgtttctccgacaagcgggtgaagcagcagaccgtcgaccgtttctaacgctgttttttgaatgtattcatgcgctctgtgaacagggttcctggtttgaaagccgacaatcgtcttccagccgagttttttaaaggcggctcttgtttcagcgggcgttgcataaaactgttcgaaagatttgtcaggcaggcggctgaccgtgataggccctccgatatagtaatccgggcgcgccagcaatttttttacgcctgggtgggcaggatcgtttgttttaaaaacagacagtgcttcttgtgttttatcaggctggtatatatcggtgactgtgatcatgccgtaggtaacaccgtctttcacaagcttgacgtgatctccggcagacagctgttttgctgttttttctccgacaggcagcgtaatcggcaggctccacggcaagccgtttgccagcctcatttctttcacaacacgatgataatctttttccccaaaaaaacctgttaacgggctgtatccgccgatcgcgataagctccagatcactcagtgcaagctgatccagctctgcttggcacgcgcacccttcaaaatggcatgcgggatcacagcggttgattaatacccctccatggggttcgtttccattcaacgtgttcaacctccatttatacgtttccttgttttcttttctgcagttaatgaaagtttgacatcagcgtctcaacatcatttcgattctcacatcaagaacctgccatccgctattcctgatgcaggccgcattctgttttctcccgtccggcccatcttccagccctctcatcgttcgggtccggggaaggcagtgtacacatttcacagcctatgctcggataatgttgatcgtgcagtttgttataaggcaaattgtgcaggcggatgtacgtccaaacgtcatcccatgtccagtggataagcgggcaaattttgatgagctcaaacttctggtccaggtttacgtattgaatatgctttctcgttggtgactgatcccggcgcagtcctgaaatccaagctgtcatgccggacaggtgctttttgagcggttcgattttccgcaattggcagcagaggttcgggttatgcttccacagctctccgccgtacttcgtcccctgttctgttaagctcagctcgggttcgagcatctggattgcaaatcccggatatcgctctttgacggtctcgatcagctcatatgtttcctgaaaatgaagcccggtatccaaaaagatgatgtgtgcatttttgttgatttttgatattaagtcgagaagcaccattccttctgcgccaaagctgcaggcatacacaatcttttctccgtacgttcggtaagcccatttcaacacatcgagctcatcgatcaattgatccgttatccgtttggacagcatgtcgttccatgtgtcatatgtgatggtttcgttcaatgttttccccccgtttgcatctgctttttttatctattgatcgagttataggcagactattcattttttgcataaaggttcaggttttaggtgccgcgcccgcctaaaatgaggtgcggaaccattaagagcccggctgaatatgctttttagcaaaatggttttatgcccaaggagaggtagtatgccgattgccatttatcaggggcatcatcattcgcttgccccggcggacattaacatcgtcattgatgtcatcagagcctttacggtcgcccattatgcgtttatcggcggggcgaaagagattttgttggtccggacagctgatgaagcctttgcgctgaaagacacctatccggattatgttttgacgggagaggaaaagggggtcggtatcagcggatttgatttagataattctccaaaacgtatggctgggcagaatatgacggataaaagcctgatccagaaaacaacaaacggcgtcacagcagcattgggggcgctgaacgcaaagcatctgttcgtaactggattttccaatgccaaaacaacggcacagcatgtgaaaaagctcgtcgcaaacgattgtgtcataaacatagtggcttcccatccatccggtgatgacgatatggcatgtgcggagtatatcaaaggcatcattgaagggacaaatgtggtaacggctgcggaggcgattgaaagaataaaaggctcttctgttgcggagaagttttttgactgccgccagccattgtttgattcggaagacatcgtttactgtacaaaagaactgacgggcgatttcgtgatgaaagtgaaacaagatggagaagttccaacgatagagagggtcataatatgaatgatttttcactagaattgccagtgagaacaaacaagccgagagaaaccgggcagtccattttaattgataacggctatcccttgcaatttttcaaagatgcgatagccggagcgtccgactatattgattttgtgaaattcggctggggcacctcattacttacgaaagatcttgaagaaaaaatcagcacactgaaagaacatgacattacatttttctttggcggcacactgtttgaaaagtacgtaagccagaaaaaagtgaatgaatttcatcggtactgcacctatttcggctgtgaatatattgagatttcaaacggtacgctcccgatgacaaataaagagaaagcggcttacattgccgatttttctgatgaatttcttgtgctcagtgaggtgggcagcaaggatgcggaattagcaagccggcaaagctctgaggaatggcttgaatatatcgttgaggatatggaagcgggcgcggaaaaagtgattacagaagccagagaaagcggaacgggagggatctgttccagcagcggcgatgtcaggtttcaaattgttgacgacatcatttcctcggatattgatatcaacaggctgatttttgaagcgcctaacaaaacgcttcagcaagggtttattcaaaaaatcgggccgaatgtgaatctggccaatattccatttcatgatgccatcgcgttggaaacgctgcgtttagggctaagatccgataccttttttctgtaaaatagcggctgcggggctctcgtcgtgaagagagcctctgcctattattttttatggcggtacataggcgtgagatagggaagtgaggtcaggcggatgttgtagatgaagtcgatgactcttgtcgatatcacctggcatatgagggcttgaatgacgatgccccagtcaataatagacgcggtgaccataaaaatgatgcaattcatgatgagcaggatcgttccaggattcccgccgcggtagatagaaatcatcagagcaagggctccgaatcctccgttcgaaattttatatttgtataaaagtccgattccgagtcccaataacactgcgccgcttgccagatcaagccacaggttagatgtgatatcaggaaaaactgcatcaaagatcaataccgagacagaggtgacggtgatagaagcgagggtgccggtgaatgttctcatctccagccattttaaagcggtaaaaagcattgatacattcacagcccacactgaaaatccgtgggggatttgaaacagataatgcaatagcaccgcaatacctgctgcaccgcctgtcggaatatcatgcggaaataaaaacaaggacatgccgagtccctgtagtacgccgcctacgacaatcataaacgtaagttttgctttcatcagcagttcagccattaagtcatttgctcctttatgaaaagacttgtccgctgttttcattttatgaggctgtccattatttatgtctcaaaataaagaaatggcccagcttaataggctgagccatcccacttgtagcgattgacgatctccatattgatctctgtgccaatgccttttcctttcgggatgtggaccattccttttgaaggctgcaggctgacgagatctgtaaaaggattctccatgacgtcccactcgatcggttcaatgtgatcgtacttcattttagaccatgggggcagacaggcttgtgcaaataaagcatagagccgtgaaagcgatccgtcatatgcatgggcggatgctctgacgccgaaataacgcgtgagctggaggcagtcccgaaactcatcaattccgttgacatgcatgacatcgggctgaatgatatccaaacagcgctgtgaaaggagaggcacatattgcgccgggcctttcatgttttctccgccggcaacaggaacagacaaacggcttcgaagcatagcgtaatcctgcggctgatcaaagggcaaaggctcctcaagccagccaatgttcgtccattcggagaaatagcgctcccatttaaaagccgcagcggtatcgtagctttggtttgcgtccagaatcatcgtaatggagctgcctgctgtatgctgcagcgcattgatgtgccggacatcctctttgaatgaagtcccgccaattttgactttgatttgctcaaaaccttttttcaactgggcttcaacattggagactgagcggctgatccattgcggggagtctgagtacgattgaaaagacgcgtacacaggaatctcctctctgtatcgcccgccccataattcgcaaaccgaacaatccgcagctttggctgcaatctctgtcagcgccatgcttacagcggaggccgcccgctggtgccatttttgaatcgtgcgcactaatgacaggcggctgccagcctgttttcctaaaagaaacgggatgatccgtttcgtaaaaccgacatggagagcagggagccaatcaacacattctccccagccgtctatcccgctttcggtgataatcctgatcagataacaagtccgatatcgtttaagcccgttggcgtctccgtatggcttgtttaatcggtgcaagagcggaaaggtttcaatgcgtacaatcttcaaaccgtgtgctacctttcctcagcgggctgcagccgattgccagccattttagggtcttctttctcttttgtttcttcattattttgcttcacatggattaacatcatcacaagaatgccgacaacgagagtcaatcccgcaatgcttaaaaacatgccgggtctggaccattgcatcaggcggccgaaaatcggagggccgattgctacccctaagaagcgtacagatccgtacagcgaggtgacaaatccccgtctttccttgccgacagccccggtaatgaaactgttcacacaaggaaggacaagacctgagccgatactgctcagcacgagaacactgataaagaggacaagattttcaatgaatgacagtgccgcgtaagatacggtcatgaacgccaatccgagtacgatcagttttttcattaacgattgcttttgcccgattttgcttcctgttgtataagacgtaacacacataaccaaaagcggaatcgctaaaatcaagccttttttcacgccgtcggtgtcgtatgttttttcaagaacatctgataggtaaaacaggatgccgaataaagtaaacaaacaggtcgcaccggctaaataagcggtaaacagccatctgccttcatgtttaaaaacacttaacagccctttcgcatattttccgataggtggcggttctttttcctttttcttctctttaataaaaatccaagtcagcacgattgaaatgatacaaaacacagggaaggcaaaaaacgcgccataccagacaagcagggcgataagcgagccgatgatcggtgaaagcactttccccatgccgtttgaagcttcaacaaggcccagcaccttgctctcctgggcgcctttaaacagatctcccgtcagtgccatggcaatggggcctgttccggctgccccgattccctgaagcgctcgtcctgccatgacccaaggaaaggcattgtcaaaaaaacctgccgcaaacccggctaacaaaccgccggcaccatacaaaattaagcagggaataatgatgattttccttgagaatcggtctgcgagataaccgacaatcggaatcgcaaatgctgcaatcaaggaaaatactgtgatcacgagactgacttgaaattgtgataaatgaagttcagatttcatttttggcaaaatcggaataagcatcgagtttcctagggttaatattaaagggattgaaccgattgctacaatcgtcattccgttattttgttttgatgattccatctcagagcacactccttttcttctgcttagaatgtccctgatggcttcgtttattcagcgatcagacagcaaaaaaccgaacagaagatacctgttcgggaaaaaagagggttaaccgagagcctgtgaaatcaaagcatataagtgtccattttgaataggcgcttttttctgatagaacaaaatcggaggttcatcatctttatgaaatcccatttctatcaggctgtcatgcagagacgtgtgttcactcggtatatcgattcgcatcggcccttgtttgccggccgccagccttgtaattatctgtgctgcaacatctgatgatggagcgatgatagggccgaatttcaaattggccggtgtctgtacagaaagtccgtagccaatgagctgtccgtcctgatttctggcgatgatacattcgcatgaagcagaaataagctgctgcaaaaggtttgatcgatctccgccaaaggcagccagatccgccgcggttaagtcgtgaaagtcttgttctctaaaggatgtcagttcagcatcaagcttttttgtataaggttgaaaactgtgacagctgtactttcgcactgaacctgccgtatgaaaacctgctttttcataaagcggcaaaccttcttttgtggcgcaaagcctgatggcggtgttttcatccgtttgggtaatacaggcgtttaccatacgccggccaagaccgagccgttgatattctttgtcaacgatcacgaggccgatagaagcaagccggccaaacaaaaacaagccgatgcaggaaataatatcaccgctgacattttgatagccgaaaaagcgtccttgctggacaagcagtgccagctcttgttcgccgtaatccggccacccggcttgcctgcaaagccgcaatagactagggatatgttcttcatgaagcttaatcagctcatcgattaccctcatacagatcacctgcttgtttcgagttttttatacatgatgatatgtgtgcctatgccgggaatctcaaacggttcgccgagttcttcccagccaagctttgaatagtagcctttcacatggcttctggcattgcaccagactgcctgaacgccgttctttgccagtttctcttccgcgtgtttgatcagcgtgctcccgcctttttgatcacgatatccttcaagcgttgccatgcctctcagccgatatgctggggattctgttattaatggctgattttgcggggaaaaagaagcgatgctgatcagctttccttcaaaaaacgcgccgagatgaaaggagccttttgcatgatcctcttcatatttgcattgttcaatggattgatggggacgcagaatgcggtgccgaatttcatatgtatcttccgcggaaatggttttgacttcgagcataatgttcctcctcatgactgtttttctatatcgtaacacgaatcccgttgaaaaagaccgcccgattggatcagacagtcttttaagggattaatgcaaaaagatattttggcgctgctcatctttttgctgaatatatgaagtgagctcagcggttaagtcagatctgaggaaaggcgttatcaagtagatgccgttaaacagctcgcatgccgtatccagcagggagcgtgcaattgcaaggccttccgccttttgcttttctttatcttcaccggcatgggccattttttcgcgaatcgtatcagacagcttaatgccgggaatttcattatggatgaattcggcattccggctgcttgtcagcggcatgatgccgatatagatcggcgtcttcagatgttttgtttcgttatggatatcgacaagctgctgctcggaatagacaggctgagaaacaaaataatctgcaccgcaatctatttttttctcaagccgttttaccgctttatccagatggcggacgttaggattaaatgcggcggcaactgagaaattcgttttcttgccgagcggttttccagacagagacagaccttcattgaattgtttgatcagcctgattaaatcaaaagatgttaaatcatatacagacgtcgcaccaggaaaatccccgattttagaagggtcacctgtaatagcaagcacgtcattcagccctaacgtatcaaggcccattaaatgtgactgtaagccgataatgttacggtcacggcacgtaatatggacaagggaacgcatatcgagctgctgcttgacaagggcaccgcaggcaacattgctgatccgcggggtcgccaaagaattgtcggcgagtgtcagggcatcgattcccgcttcttttaattcagcagcagcggacagaaatttgtcaaagctcagttttttcggcgggtccagttctacgataatagagcgttttttcgctgcgatctcatccaggccgggctcggttcgctcgtgatgaacagaaatgaattctttggcccgggttttgacttctttttccgtaatcggagccagtccgccaactgcttccgccatcgccctgatgtgattcggcgttgtgccgcagcagccgccgataatccgcgcaccttgcttacggaattctgacgcgctgttttgaaaatacgtgccgtctgtttcatagacgagccgtccctcttcaagcgaaggaagactgctgttcggataaacggataagaatacgtcatcaaaaattggcacttcgctaagcgcttcaatcatgtgataaggcccgagccggcagttaatgccgacgatatcagccccgagatccgcaatcgatcgcaatgcttcagaaagaggtgttccgtcctgcaatacgccttgctcgtgcatggagacattgagcattatcggaagatcagtctctttgcgcgcgattttcagcacttcacgggcttcttccaaatcataatatgtttctaacagcaagccatccggctcttcatgcagcagcagatacagctgctcgcggaagctgcgcttaatttcgtcaagactgtacgcgtttttattaaatgtgcgtatgccgcccatcgttccaagcacgtatgcatcgcctgctgaagcccgcgcgatctttacggcctcctgattcatttttttgatgtcatcctcaagcccgtgtctggataatttaatatagttggccccgtacgtattcgtttgaataatgttggctcccgcttcaacgtacgctttatgtatgcgctgaatttcctccggctttgaaatattgagctcctcaaaacacctgtcaatgccataggagtagaggagcgtccccatggcgccgtcaccgattaacacctgtctttgcaaatcttctaaaagtcccattgtctgcctcctttattcacatcagcaaggaaaaaagagaaataaaaaaagtcctcttaagaagaagactttgtcagtgattttgtctcttcttatcttccaagctgttcgagcttgctggatttagcaccttggtcatggctgatcgccattacaccggttgctgaagcttcgtcgggccagtccctctgcttctcttgataagaacggatatgaaattttcgtgtcaggaagtgccaaaagatatctggcgtttttccctttctccaaatttaccgaaaataaagacaataatcaataggaatcagaaaatttatctgaaatttataaattgaacgtcaattggcagatctgctccccgtacagctgagataatctgctgcaggtcatctttgttttttccggtgacacgcacttgatcatcctgcacctgagactttactttcagtccggagtttttgatgatcgtattgattttttttgcgttgtccttgtcaatgccttgaacaagctttgcacgctggcgcaccgttccgcctgacgcgttttcaaccttgccgtaatcaatgttttttgtcggtacgtttcgtttaatcaatttgctgaccagcacatctttcagctggcttaatttgaattcgtcatcggaaacgaggaccagctcctctttatctaaagaaatgtcgcttttgctgcctttaaagtcatatcgggtactgatttccttcagtgcgatttggattgcgttttgcacttcaggcaattccaccttggatacaatatcaaatgaactttcttttgccatatgaaaacctccataacatttaacttatgtgttgattatagtagaataaagagaaacttccaacagaacaaagaatcaatttgtgatgattggaaaaaatgttaacaaaatccgcagagaataagcggaacaggaaggacgatagcatgagaccagggcagcaattaaccttgagtatagatcaccaaaccgacttcggttactttttaaccgatggggaagatacgattctcttacataacagtgaaatgactgaggatatcgaggacagagacgaagtagaagtctttatatacgtagaccagcaggaaaggcttgcggccacgatgaaaattccgatcatcagcgcggatgaatatggctgggttgaagtggtggataaagtggaagatatgggcgttttcgttgatgtcggtttatcgaaggacgcactagtcgcaactgagcatttgccgccgtacgaagatgtctggccgcaaaaaggggacaaactttactgtatgctgaaggtgacgaaccgggggcgcatgtttgcgaaaccagcgccggaagatatcatcagcgaactgtttaccgacgcttcagaagatctgatgaataaagagctgacaggtacggtgtacaggctgatcgcatcgggttcattcgtgatcacggatgacggtatccgctgttttattcacccgtcagaaagaaaagaggagccaagactgggttcaagagtcacaggccgggtgattcaagtgaaagaagacggttcagtcaacttgtcgctgcttccgagaaaacaggatgcaatgtcagttgatgctgagtgcattctaacgtatatgagaatgagaaacggtgccatgccgtacagtgacaaaagccagcctgacgatatcagagaacgttttaatatgagcaaagccgcctttaaacgcgcgctgggccatttgatgaaaaacggaaaagtgtatcaggaaaatggatggacatacgagaaaaaatagcatgaaaacggctcgcctgcagcagactgcggagcgagccgtttttttatgtctagtttaattcatcaaccagcgttctgattgccatttcgcgatccacattgtctgaaatcgcaatcggcgtaatatcaatggcgagaatgatcagaatcagggcacctgctgcagcaacataagaaacataatagaaatagttagcggtatcaacagtgttgacaagctcggcctgaactctggatgtatcatccttagaagcggcgatttcctttgcagcttctactttttcttcaacgatttgacctgcttttttcagcagttcatccactttcaatgcatctttgctgtaaacagctttcttcaggttatcaaaaaagtcagcatcctcttttttaatatcagcgacaacctgattggcaaaagcctttgcctgttttgtgttgagtttgtctgtcatcgctttattaaagacctctggaagctgtttgccaacttccccttgggcaaacacaaagcctttaaaaatttcctcacctgaatactcaagctgctttgcctgtgccacactttcttgctgcttcaccaaaaacacagtcgtcaccaatacaaccgacaaaaatactagaaacgccttcttcaaactgaaacctctcccttcttgtgttttttattccacaacagtctgcgaatatatgtaaattgaatcgtggaatcgataggagtgagatacaatatcaaaatgccggccatgataatcgaaaaactgatgaggcccagcatgactgcaaaaatctcatgcataaaaacagcgatgatcaaaatcaatctccaatgcttcttcggcgcaaacagtgccgcgaagatgacaatttgaaccagcagcgtcccccatgtcggaatcaccacgaacggacttgttacaattggcttcgttaacgcctgaaaaaagccgttgaagccaatggttttttcctgggcgaaataatagacggccgttccgtccacccattcctgctgagatagcttagcgacggtagagtgaaaataaagcaccgccacttggattctgatcacaaaataagaaataaaagctgttatttttccaagtgttcttttgccctctataggtctcgtactccaatgccattttctcggatcggtcagcgtgatgggaagcaataaaaaggtcatgactgctgctgcctgctcgcctccgtcgatgacgatcagcgatgactgcaggctgtaactgacataccaatgcagaaccccggtgattctggggcgccagccaatgacaacaagcaccagaatggcaatgcagacccatctgaaaagatttaacatcatatagttattttcgccgagacaaaagagactgagattcattttacaagctggatagctgctgatcccgctggctggcttcataatgaggctcgggtgattgatgagcagcgtcagcaggctggatagcgcaatgatgcttcgcgcgaggccatatacatttgtccacgggtttctttcgtcccatctggtgatggtctgttttatgttttcgagcatgagatcacaaccttgactatgctttttacctgataagacgaaggggtatatttagaatagctccaaggaacaatatcctctttcgtcaaatagtagctgccacaaagcagcgggcggggagcgggtgtttttaattgcacggttttggctttgcttttgcatgcgccgaggtccttttctttacatgctgtccactgttccttgccgacttggctgtagatcacgcccatttcaacgccttgtgaccgcccataccgatacaggccgaataggttgtcagccctcatattgggccatctgaccttggcgctggcattttcagcctcatataagccgattgcagtatcacgcggatttttgctaaaaaagccccagccctgagggaggatgctggacatgagaaatttggagtcctttgtcagcggaatcggggttgtccctaagctgccaataatagaaaacagaaatagcgaaccccaaaggattgaaaaaatgacaaaaaatgatatcgatttctgcattcgactgctccttttaacctgaagaatcgtttttacacttttcataatataaaaacatttatgtaataaaaaggttaaaaagtatgagaaattccatttttgttaaaaggaaaaacaggacattttacactgctatatgtgattgatatatagtgtttttttcgatatatttaaaccatgaaaacgaatcaagttaatgaccgctggattgttcaatttcgaaaagggattttcgagctggccatcctatccctactgcattctaaaccgatgtacggttatgagctgacgtcatccttaaaaaccacctcggctctggctatttcagagggagcgatttatccgattctgaaacgtatgaccgagaagggatggatcgaatttttttgggaagattcactggacggcccgaaaagaaagtattacaaaatgacacaaaaaggagaagaaatgttaaaagaacggctggagaaatacctggaaacccatcaagccttactgtctttatcgggggatttgctatgaatggacagcttatcattgaccgatacatggaggaactaaatgcagagctggagaatatgcctgatgtagagagagaaaacgctatcgacgaattaaaggggcatatcaccgctttcgttcaagacagaatcaaagccggccttagtgaagaggaactgcaggaagctgttgaatctgaattttctcatccgaaggagcttgccgaattgatgatgggtgatgggggagagacgaaaaggaggaggtctttattgggcaaaagctggctttcggtccttctcattgtcacgattatcgccctgccgctgctgccgtccgacttcagacatctgccgctggctgtttatttaatggtgctcgccggatatgtatggaagcggaaaaaattgatgatgtttgcaggtgtcagaaaaaacaaaatgcgctctcaaaaggagattgttacgatttcgcgagtcggtgcggtttatctgctgtttttagcagtggtgcttcttttgagcccgttcctcaatgcgcttgtcgtcctgctgctgattgcagtaagctgcgccgctttttttctttttcttaacatcaagtaatcttgtaggaggctgtaagatggaaatcagcatcaattatctattaattgtcatcgcgcttttattctttgtggttgcctattttgtcggaatcaaaaaacaaacctggatgctggctgggtttaacgaggcgcgtatacgggataaagaccggctggccagaatagcaggctactttttcttgaattccggtttgttcattttgctgaatagttttatctcatttcaaggtcaggagcagctcatacctccgcttatactggcatatggagcaggggttattatttatgtcaataaaaaattagtagagtagaaaaagaagggcagagcgaaatatctctgcccttcttttttgggaaaataagaacgaagcaccacatacaagtttttgtatttttgataggatgaagaaaaatggtagattccaaaataggaaggatgtggtgttttgcgcaacctgaccaagacatctctattactggccggcttatgcacggcggcccaaatggtttttgtaacacatgcctcagctgatcaaagcatcaaatacgaccatacgtatcaaaccccttcatacatcatcgaaaagtcaccgcagaagccggtacaaaacacaacccagaaagaatcgctattttcctatcttgacaagcatcaaacgcagtttaagctcaaagggaatgcgaacagccattttcgtgtttcgaaaaccataaaggatccaaagacaaaacaaacgttttttaaattaacggaggtttacaaaggaattccgatttacggctttgaacaagcggtcgcgatgaaggaaaacaaacaagtgaaaagtttctttggaaaggtgcatccgcaaatcaaggacgtctccatcacaccgtctatttctgagaaaaaagcaatacatgcagcaaggcgtgagctcgaggcttccattggaaaaatcgaatatcttgatggggaaccaaaaggcgaattatatatctatccacacgacggtgaatatgatctcgcctaccttgtgagactctcgacatctgaacctgagcctggctattggcattatttcatcgatgccaaaaacggaaaggtcattgagtcctttaatgccattcatgaaacggcaggtacaggaatcggcgtatcaggtgatgaaaaaagctttgacgtcagagaacaaaatgggcgcttttatttggctgacgaaacaaggggaaaagggatcaatacatttgacgcgaagaacctgaacgaaaccttgtttacgcttttgtctcaactgatcgggtatacgggcaaagaaatagtcagcagcacgtccgtatttaatgaacctgcggctgtagacgcacacgcaaatgcgcaagccgtttacgattattacagcaagacatttggccgtgattcttttgatcaaaacggagcaaggattacgtctaccgtgcatgtcggcaaacaatggaacaatgctgcgtggaacggtgtccagatggtatacggggatggagacggttcgaaatttaagccgctgtctggatcgctcgacattgtcgcgcatgaaatcacacacgcagtcacacagtattccgccggtcttttatatcaaggagaacccggtgcattaaatgagtccatttctgacattatgggcgcgatggctgaccgtgatgattgggagatcggcgaagatgtctatactcctggtattgcaggagattcattgcggtcattggaggacccatctaagcagggaaatccagatcattactcgaaccgctacacaggaacagaggattatggcggagtccatatcaattcgtccattcacaataaagcagcttatcttcttgcagaaggaggcgtgcaccacggtgtacaggttgaagggattgggcgtgaagcaagtgaacaaatttactatcgggctttaacatattatgtaacggcatctacagatttcagcatgatgaagcaagcggcgattgaagctgccaatgatttatacggtgaaggctcgaagcaatcagcttcagtcgaaaaggcgtatgaggctgtcggcattctatgagcaaacaaaaacagtcaggacacagagtctgactgtttttgtttgctcattttcttaaaaagaatatcgccaatgtacctggaccggcatgcgagccgattgctgaactgattggatgcataatgatttctttcggcttgaacgcttcctcaatcaggtgtttcatgtccgtggctttttctttgttcgcggcgtagctgatcccgacggtttgatcgctccaatcatccccgcgctctttcataagctcgatgatccgtttgaaaagtttcttctgtccgcggattttttccagaggcacaagcttgccgtcctccatctgaagcagcggtttaatattcaacaggccgccgacaaaagcggacgttttggatatccggccgcccctcgcgagatatgttaaatcatcaacggtaaaaatgtgttcaagctggctgcaaaagttctttacagacgtttcaatttcttgtattgtattcccgttgatacagagatcggcagcatgccggacagccagaccgtatcctaatgaagcgcatttggaatcaatgacccgcaaatcgaaatcggggaattcctccttcacttcattggcgatcattacagctgtctgatacgtgccggagagacctgaggaaaaggcaatgtaaagagcgggatcacctgtttcggcatattgcaaaaacacatttttaatcgtttgcggtgaggcttgggacgtcttaggcgtttctccattttgcatcgcttcaaatatttgatccgcatgaattgtgactgcatcttcgaattctttatcgccgagagaaaccctgagcggaataaagccaatgcctttttcttcaaaataagaacgaggcaaatcagtggcgctgtcagcgatgagatgaactgtcatattgcttcccttctttccgttatcgctcgttatcatgagagttaagccaactatatcatattaatttgccaaaatcgtgttcaaatatttgttttaagggaaaacataataaagaagaaagagcggaggaacatgccatggtactagatcaaacaaaaaaattactcatcgtcatcatcggcgctttactcaatgctgccgggctgaacttatttttgattccagcagatgtatatgccagcggatttacaggtgttgcccagcttttatcaagcgtcgttgatcaatatgcccccttttacatatcgacgggaacgctcttgttcctcttaaacattccggtcggtattttaggatggctgaaggtcggcaaatcgtttacagtgtacagcattttaagtgtcgcactcactactctgtttatggggatcctgccggaaacaagcctgtcacatgacattttgctgaacgcggtgttcggcggcgtcatttccgcagtcggtatcggcttaacattaaaatacggagcttcgacaggcgggcttgatatcgtcgccatggtgcttgcaaagtggaaggataaacccgtcggcacgtatttcttcattctgaacgggattatcatcttgacggcaggattattgcaaggttgggagaaagcattatataccctggttacactatatgtgacaacgagggtgatcgacgccattcacacccgccacatgaagcttacggcaatgattgtgacgaaaaaagcggacgaaatcaaggaagccatttacggaaaaatggtgcgcggcatcacaactgttccggcaaaaggagcttttacgaacgaacagaaagaaatgatgattatcgtcatcacgaggtatgaactgtacgatttagaaaagatcgtcaaagaagttgatccgaaagcatttacgaacatcgttcaaacgacagggatttttggtttctttagaaaagactgacgaaagcaggtggaagtcgtgaaacggctgcttgtgatgctcctccccgtgctgcttttgataggctgcgggaaagatgagcagacagaacccgataaggaggtatcaggcggaatggagaatcaagaggttgttttatctattgacgcaattcaggagcctgaacaaatcaagtttaacatgtcgctgaagaaccaaagcgaacgtgctattgagtttcaattcagcacagggcaaaaatttgaacttgtcgtgtatgattctgagcacaaagaaagataccgttattcgaaagacaaaatgtttacgcaggcttttcaaaacctgacgcttgaatctggagaaacatatgatttctctgatgtgtggaaggaagtcccggagcccggaacctatgaggtaaaggtgacatttaagggcagggcggaaaatctcaagcaggttcaggctgttcagcagtttgaagtcaaataagaggctatggcgagtcgccatagcctttttttattggagtttgtccagctgattttgaaattgatgcagctgttgacgttccgcatctgtcgaattggcatacgcagaagatacagcatttttggctctcagaatcgcttgctcctgatcgccttcctcaaagccgtttgtcaccatgaccgcctgttgaacaaatgattttgcctgctgaaacagttcatttctcatttaatattcaacctggctttcggccgagtctcgtgccgcggcatgctggtgagcttcttctaaagtagaccgatatggaaatcttgcggcgtgtagcccgatggagtctttaccctgctgaataaaccttctggatttgcttcgtttacccattttgagactgcccccttccatactttgacgagatgagtcgtcttcaatagtatggtggggcaaagtaaggtttatgagtgggaaaaattaatacggaccttctttaaagtgagaaatattctttcaaaaatcttgcaacgccgtcctcttcatttgtagccgttgttcggttggcaatctgcttgaccgcgtcaattccatttcccattgcaacgccgcagcctgcaaattcaagcatttccaaatcgttatcctcatccccgaaagcaatgatccgctccctcggcacgccgtaataatcgctgattttctgcaggccgaccgctttattcatgccgcttttgataatttcaatgacatgccacggtgcggcccatcttctatggtcgattacctcggcatgcacatccgataaatatgagcgtattgccggcacatcttcttcttttgcatgtatgagtacagacgtcacatcttcaccaagattttcccgcaagtctccgaccgttacatttgttgtgttcatgttaaaggcatctatcaggtgctcatcatggtaatgaaagtatacgtcgtcaatcacttcagcaagcacgttatgtacgttgtagctctcgctgatatccacgagctgtttgacaacatcaagcggcagtgacgtatgataccgtccccagctgtcgtcttgcggatgatggacaaatgctccgttaaaattgacaattggcgttgtcagctccatctgctggtagtacatggaacttgaacgatacggacggcctgttgagatgcagacataatgcccgtcatcttttaggcgctgtatcgtatgaagggtgttttcagatatggttttatcatcctttaataatgttccatctaaatctaatgcgattaaatagggttttgtctccatgaaaagctcctttaaccttagattttgcttgttttgccttacttacagtgtagctttttaccatctttattgtctacatgttacacttatgattatggttatcctaaggaggggcacattgtgatacaaattgagaatcaaaccgtttccggtattccgtttttacatattgtaaaggaagagaacaggcaccgcgctgttcctctcgtgatctttatacatggttttacaagcgcgaaggaacacaaccttcatattgcttatctgcttgcggagaagggttttagagccgttctgccggaggctttgcaccatggggaacggggagaagaaatggctgtcgaagagctggcggggcatttttgggatatcgtccttaacgagattgaagagatcggcgtacttaaaaaccattttgaaaaagagggcctgatagacggcggccgcatcggtctcgcaggcacgtcaatgggcggcatcacaacgcttggcgctttgaccgcatatgattggataaaagccggcgtcagcctgatgggaagcccgaattacgtggaactgtttcagcagcagattgaccatattcaatctcagggcattgaaatcgatgtgccggaagagaaggtacagcagctgatgaaacgtctcgaattgcgggatctcagccttcagccggagaaactgcaacagcgcccgcttttattttggcacggcgcaaaagataaagttgtgccttacgcgccgacccggaaattttatgacacgattaaatcccattacagcgagcagccggaacgcctgcaatttatcggagatgaaaacgctgaccataaagtcccgcgggcagctgtgttaaaaacgattgaatggtttgaaacgtacttataaagcacgaagttattaacaagagctgaatttacgttatactgtagaaaaaaggagtgagggaacgtggaagaagcattaaaagaaaacatcatgggcgccctggaacaggttgtcgatcctgagcttggcgttgatatcgtgaaccttggtttggtatacgatgttgacatggatgaagacggcttaacgcacgtgacgatgacactgacatcaatgggatgccctttagcgccgattatcgtggatgaggtgaaaaaagcattagcggaccttcctgaagtgaaagacacagaggttcacattgtatggaatccgccttggactagggataaaatgtccagatacgcaaaaattgcgcttggcattcaataaaacaaaagaggacagcctgacatgtgaggctgtccttttttacagctgaaaggagtgaaaggaaatgatgtacctgctggcagttttatgcccgccgcttgctgttttgttttcgggaaaaccgtttcaggccttgctgaatctcatattgacctgtatcttttggctgccgggcgcgattcacgcctgctttatcgtcgccgaccgccgtgccgaaaaacgggcaagaagataatttgggaaaatgaggatgcagtcatggtataatggtcataaaaacagcagggagagcactatgaaaaagaaattgcttgcattcgcgctttgtactggcgcgtatgcggccctgtttgcgtactctgtgcactcagagcaaaaaacagacacaagcgagatgacggatgtcagccgcctgatgcctgtaaaaataaagcagacagtgaaagggcaggaagaggaaacgctcattgacacagtcaaagaggcaaatcgaaaaaacataaaaatttcaatcgccggggcccagcactccatgggcggccatacatattatgaggacggcatcgttctcgacatgacgggctacaacaaaatcctgtcactcgatcaagagaagaaaaccatcagggtgcaaagcggtgcaacgtggaatgatatccagaaatacgtgaatccatacggactcgcggtaaaagtcatgcagtcacaaaacatttttacaatcggcggatctctcagcgcaaatgcacacggacgtgatattcgctacggctcgctgattgatacagtcaaatcattccggcttttaaaagctgacgggacgattatcactgtcactccaaaagatgatttgtttacggcggtcatcggagggtacggcctttttggcgtgattcttgatgtaacgcttgagctgacagatgatgagctgtatgtcatgaagacagaaaaaatgaattacagcacatactcagactatttttcaaagcatgtaaaaggaaatccagatgtccgaatgcatctggcgcgaatttcaacagcgaaaaaaggatttctgaaagacatgtatgtcacaaattacgtattggctgatcatcaggatcagctgccatcatacagcgatctcaaagaagatgagtatacgggagccacaaagtttgcactcggtttgtcaagacagtatgaatggggcaggaattggctgtgggacacacagcaatcctatttcctgagccaaaacggcacagagatttcacgcaataacgtcatgcggtccgaatcaaagtttcttgagtatgaaaacaatgacaacacagatgttttgcaagaatactttgtgcccgtgaaggagtatgggtcctatattgatgacctgagacaaacgctgtcggacgaagatctgaacctgctgaacattacgatccgctacgtgcagaaaaatgaaaaggccgacctttcctatgcgaaggacgatatgttttcgctcgtgctattaataaacgagggcttttcaaaagaagaccaggcagataccgcccgaatcatcaggcgcatgacagacgttgccatcaagcacggcggcagctattatctgccttatatgacctaccagacaaaagcgcaaatgagacaggcatatccgaaaagtgaagcgttttttcagaaaaaacgaacctatgacccgaatgagcgctttatgaattacttttatcagaggtataaataatggggaaaaacaaattaaaatggctgacattatcacaaagcagcgtgtttttcgcaagcagcttaatctttccgttttatattctgtttgtgaaaaatatcggctcaagctacacacagttcggtttttcctacggattgttcgggttgagcggagcgctcatttacccgctcctcggacggctgtctgaaaggtttgacagccgttattttctgcttctgaactcgtgggggatggctgttctgcttttatatgtcccgcatatcggaagcgtcgttcaagtgtatatcgtccaagtgctgttagggctctttggagcgatgcaaaagcatggagaaaaagtgctgatcgctaattttacagacagcggagagcgtggaaagaagattgggaattaccatttttggacggctgtcttttcagcagcagcaattatgcttgggggctttctcgctgactttttcacagtgcaaatgattttttatgcaagctctattctatattttttgagtggattgatgatgatgaaaacaggctgacgcggtcagcctgtttttttatgcggctgaaaagcggtgctgcatcaacgtttttgtgctggagttgtgctgatttttttgagcggaatttccattgaacagaaaatttataaatgaataaaaatattaaatatacgattgaattaatttttattcatgttataatgttaaataatttcacaaagaccaagagggtgaacttgttttgaaaataggaattgtaggtgctacaggatatggaggcaccgaacttgtcaggattctctcgcatcatcctcatgcagaggaatgcatactttattcatctagcggagaagggaatgtctatagcgagggttatcctcatcttaccggcttagcggatcagaagctgaagccgattgatatgaatacgatcaaacacgaaatagatatcatgtttctcgctgcgccgcccggagtctcaagtgaattgactccaaagctggcagatgtgggaattccggttattgatctgtcaggtgatctgaggatacaagaaccggctgaatatgaaaaatggtataaacggacagcggcaccgaaggcggtgatacaagaggcggtatacggtctggcagaactgaatcaactgcaaattcaacaggcgaaactcattgccaatccaggctgttttccaacagctgttttgcttggcctcgcgccattggctcaaaagaaactgctcgatgaatctttcgttatcgttgacgcgaagacgggtgtttccggagcgggaagaaaagcatccatgggaacccatttttctgagctgaacgacaattttaaaatttacaaagtcaatgaacatcagcacacgccggaaattgagcaggcgctgaatgaatggcagccaggcctcgggcccattacattttcggctcacttggttccgatgacaaggggcatcatggcgacgatgtataccagattaacctgtgatctatcagcagatgacctgcatgatttatattcggaattttaccaagattcatattttgtgagagtgaggccaaaaggtcagtacccgcaaacgaaagaagtgtacggcagcaatttttgtgatatcgccgtgaccctcgatgagagaacgaacagagtcacgatcgtctcggtaatcgataatttaatgaagggtgccgccggtcaggcagtgcaaaactttaatttgatgaatggctggaatgaagaaactggactcactatcacgccaatttatccatagaacgggagagaatcgaaccatgattcagttaagtgaagatcaaattgtaaaagtaacaggggatgtatcctcgccaaaagggtttcaggcaaagggtgtgcattgcgggctgcgctactcgaaaaaagacctcggcgtcattatcagcgagacaccggctgtgagcgcagcagtttatacccaaagccactttcaggctgctccgatcaaagtgacactagacagcttaaagcacggaccgacactgaaagccgtcatcgtcaacagtgccattgccaatgcctgcacgggagaacaaggcctaaaggacgcatacacaatgcgggagagttttgcttcacagcttggcattgagccggagcttgtcgctgtttcatcaacgggtgtcatcggcgagcatttagacatggaaaaaatccacgcggggatcgagctgctgaaagaaacacctgcgggatcaggcgattttgaggaagcgattttaacaactgatacggtgatcaagcagacgtgctatgaactggcaatcggcggcaaaacagtcacgatcggcggagcggccaaaggctctgggatgatacacccgaacatggccacgatgctgggatttgtgacaactgacgcggcaatcgaagaaaaagcgctgcaaaaggcgcttcgggaaatcactgacgtttcatttaaccaaatcacagttgacggagaaacatccacgaacgacatggtattagttatggcgaatggctgcgccgaaaacgagtgcctgacagaagaccatccagactggccggtctttaaaaaagcgctcttgctcacttgtgaggatctagctaaagagattgccagagacggagaaggcgcgacaaaactaattgaagcccaagtacagggagcgaaaaacaatcttgatgcaaacgtcattgccaaaaagattgtcggctcaaatcttgtaaaaacggcagtatacggaacagatgccaactgggggcggatcatcggagccatcggacactccgcagcacaggtgacggcagaagaagtagaggtttatcttggcggccaatgcctgtttaagaataacgaacctcagccattctctgaatctatcgccaaggaataccttgaaggagatgaaatcaccattgtcatcaagatggctgaaggggacggaaacgggagagcgtggggctgtgacctgacctatgactatatcaaaattaacgcgagctatcgcacgtaataaaggggagcgaaatgaagaaaacaatcgtttttaaatgcggtggaagtgtcatccgtgagctgtcggaggaattttttcaaaatctgaaagagctgatggcgtcaggctggaagctggcgatcgtacatggcgggggaccggaaatcacgaatatgctgaaacggttaaatatcaagacagagttttcgggcggacagaggaaaacaacgaagccggtgctggaagtggcggaaatggttttatccggttctgtcaataaatttttcgttgctgagcttgccaaacacggactgcgagccgcaggcatttctggtaaggatggaggtcttttggaggctgattatctagatccggaaacatacggagaagtgggagaaatcaaaaaagtcgatgcgtccatggtgaacgcgctgatggaaaatggcatcatccccgttattgcgccgctgtctatgacaagcgactgcaaaacgctgaatgtaaatgctgatctggctgcttcagcagtcgccggagcgcttgaagccgataagctgatgttcgtcacggatgtcgatggaatcatgaaggaaaagcaacgtctggacgtcctgacccctaaggagattcagatgctgatcaagcaggaagtgatcaccggagggatgatcccgaaggtcaattcagccttgtcagctttatcagatcaggtgtctgaagtcatgatcgtaaacggaaaaggttcattcttcgcagaacaaacctttcaggggacaaaaatcgtcaaagcaaaggaggctgtttcatgagcagcttgtttcaaacctacggccgttgggatattgacatcaaaaaagcaaagggaacgtacgttgaggatcaaaacggcaaaatgtaccttgatttcattcaggggattgcggtatcaaatctaggacactgccatgaagcggtgacagaggcagtcaaaaaacagcttgacagcgtatggcacgtatccaacctgtttcaaaacagtctccaagagcaagcggcgcagaagctggcagcgcatagtgcaggagatcttgtctttttctgcaacagcggcgcggaggcgaatgaaggtgcgataaagcttgcccgaaaagcaactggaaaaacaaaaatcatcacttttcttcagtcgttccatggccgcacgtatgcagggatggctgcgaccggacaggataaaatcaaaacaggcttcggcccgatgcttgaaggctttcactacctgccatacaatgatccttctgcttttaaagctcttggggaggaaggcgatattgccgcggtgatgcttgaaacagtgcagggagaaggaggagtcaatccggcgagtgctgaatttttatcagccgtacagtcgttttgcaaggaaaagcaagcccttctcatcattgatgaaatccagaccggcatcggacggacgggaaaaggcttcgcatatgagcacttcggactctcaccggatatcatcacagtcgccaaaggattgggaaacggctttccggtcggcgctgtcatcggaaaaaaacagcttggagaagcgtttacccctggttctcacggaacgactttcggaggaaacatgctggcgatggctgctgtgaatgccacattgcaaattgtattccagcctgactttttgcaagaggctgctgacaaaggggcgtttttaaaagaacagcttgaggcagagctaaagagcccttttgttaaacaaatccgaggtaaaggattaatgcttggaattgagtgtgatggcccggttgctgacattattgctgaattgcagacattaggcttgcttgtattgccggccggcccgaacgtgattcggctgctgccgccgctcaccgtgactaaggatgaaatagcagaagccgtcagcaagctgaaacaggcaatcgctcatcattccgctgtaaaccagtgatttttttttcgatgtaaaggcataaaaattcatttttataattaattattcatcaagaggtgggctgttagatggaaggttatttagtgttagaagatgggacatcgttcagcggcgagctggacggtcatgaaaactgtacgggagaagctgtttttttcacaggaatgacaggctaccaggaagtgctgacagatccatcatataagggacagattattgtatttacctacccgctgattggcaactacggcataaatgaaaaggattttgaaagcaagaaaccgcaagtaaaagccgcggttgtctatgaggcgtgtgatcacttttctcattatgaagcggtatacagcctcaaggagtatttacagaaatggaacattccgctgttaacccatgttgatacgagggctgtcgtgaagaaaattcgggcaaacgggacgatgggtgcaacagtcacagcctctaaagaaggagctgagattgcccttcaacccgagaatgtggcagagcaggcttcagcccaggaaatcagcacattcggcgacgggaataaacatatcgctctcattgattttggctataaaaagtcaatcgcatcatcacttgtcaaacggggctgcaaggtcaccgtggtgccatacaagcaaatggaggccgtatacaacatcaaacccgatggcattgtgctatcgaacggacctggagatccgaaagccattcagccatatttaggaaagatcaaaagcatcatcagccgctttccgactctcggcatttgtctcggacatcagctgatcgcgctcgcgtttggagggaatacttttaagctgccattcgggcacaggggagctaatcatccggtcatcgaccgtgagacgaaacgggtctttatgacaagccaaaaccacagctatgtggttgatgaacagtcgattaatgaagaagagctcacgatcaggtttcatcatgtcaatgatacgtcagttgaagggcttgcccataaaaaactgcctgtcatgagtgttcaattccacccggaagcccatcccggacctgcggaaagcgaatggatttttgatgattatctaaagaatgtgataccagcaaggagagaaatcgcgcatgcctaaagacaccagtatttcaagcatattagtaatcggctcaggcccgatcatcatcgggcaggcggcagaatttgattattcaggcactcaagggtgcatcgcgctgaaggaggagggctaccgggtcattctcgtcaacagcaatccggcgacaattatgactgatgaagccttcgctgatgaaatttattttgagcctctgacagcagaaagcctgacagccatcattaagaaagaacggcctgatgggcttcttgccaatttaggcggtcagaccgcgttgaatttagcggtggagcttgaagaaacgggtgttttaaaagagcacggcgtcaaactcctcggcacatccgttgaaacgatacaaaaaggagaagaccgggaaaaattccgttcgttaatgaatgaattaaaacagcccgtgccggagagtgaaattgttgataacgaggccgatgccctccattttgcggaatccatcggttttcctgttattatcagaccggcttacacattaggcggaaagggcggaggaatcgcccctgataaagaagcctttacagctatgattaaacaggcgctattagcaagcccgatcaatcaatgccttgtcgaaaaaagcattgccggctttaaagagattgaatatgaagtcatgcgtgacagcaataacacatgcattaccgtctgcaacatggaaaatatcgatccggtcggcgtgcatacaggtgactctatcgttgtggcgccttcacaaacattgacagatgaagactatcaaatgctgcggacggctagtctgaccatcatttcagcacttgatgtcgtaggcggctgcaatattcaattcgcgcttgatcctttcagcaagcaatattacgtgatcgaagtgaatccgcgtgtcagccggtcatcggctctcgcatctaaagcgaccggttatccgattgcgaagatggccgcgaaactggcagtcggatacacacttgacgagctgaaaaatccgctcacaggctcaacttacgcaagctttgaaccggcactggactatgtgatcgtcaaatttccgcgctggccgtttgataaattcaaaaacgcagaccgcaagcttggcacaaaaatgaaagccaccggtgaagtgatggcgattgaacggaatttagaagcagcaatacagaaggcagccgcgtcgcttgaattaaaaaatatcgggacacaccttccagagctcagcggcttgtcaattgatgcgctatgggagttggcagtcactccggatgaccgcagatttttcgttgtcatggagctgttgagccgcagcgtctcgattgatgacattcatgcgaaaacaaaaattgatccgtttttcctgtatacctttaacaacatcatcaaattggaaaaccgcctgatggaagagggcggcgatctctcttttgacttattgaaaaaagcaaaggaaaaggggttctcagacgcaacgattgcctcattgatcggcaaaacagaggaagaggtgcgcgcgcttcgcaaggagatgggcattacaccttccttcaaaattgtcgatacatgcgcggctgagtttgatgcgaaaacaaactatttttactccacatatttcggagagaccgatggagatatcagccgcaaagagaaaaaacgcgcgctgattatcggatcaggaccgattcggatcggccaaggcgttgaatttgattacagtgcggttcacggcgtgctgacactgcaagagcttgggttcgaaaccatcatgattaacaataacccagaaacggtcagcaccgattatgaaattgcggatcgcctgtattttgaaccgatgacaacggagcatattgtaaacgtggcggagcaggaaaatattgattttgcaattgtgcaattcggcggccaaactgcaatcaatgctgctgaagcgctcgaaaaagccggcattactcttcttggcacatcatttcaaacgctcgacgtgttagaggatcgggatcaattttatcagcttcttgacgagctgggattgaagcacgcaaaaggagaaattgcttatacaaaagaagaagccgcttcaaaagcgagtgagatcggctatccggtgttaatccgcccatcttacgttatcggcggaatgggcatgatcattgttgactcgcaagcccagctttctcagctgctgaatgatgaggacagcatgccatacccgattttgattgatcagtatgtgtctggaaaggaagtcgaaattgatatgatttccgacggcgaggatgtctttatcccgacatataccgagcatattgaacgggcaggtgtccattcaggggacagctttgccattcttcccggaccgtccatcacgagcgggctgcagcagggcatgaaagatgcggcacaaaaaattgcccgaaaactttcatttaaaggcatcatgaacattcaatttgtgatcgacaatggaaacatactcgttcttgaagtgaatccgagagcgagccgcacggtgcctgtcgtcagcaaagtaatgggcgttccgatgattccgctcgccacacgactgctggcgggagcgtccttaaaagatctaaatccggaagttcaaaatcatcatggagttgccgtgaagttccctgttttttcttctcatgcaatccaggatgtggatgtcaagcttgggccggaaatgaaatcaacgggagaaggcatgtgtgtcgcatatgattctaacagcgccttgaaaaaaatctatacaagagtctggagtcaaaaaggaagcatttatttgcaaaacgttccggaagaagtgaaggagttagcagaaaacgcaggttttacaattcatgaagggacatttgcctcatggatggaacaggaaggaaaatcgctccacatcaatctgagcggttctgaagaagcacgcaaagaacgtttggaagccatgacgcacggcatccccgtctttacagaagaagaaactgtgcgggcgtttttacaaagcggttcaggccatccgcagcctgtatctctcaaagacctctataaaaaggaagtggcatcatgcacacagtgacgcaaaccagtttatacggaaaagatttattaacgttaaaggaccttagtgaagaggatataaacgccttgctcgcagaagccggtgagctgaaacaaaacaaaattcagcctatattccatggcaaaaccttggcgatgatttttgaaaaatcatcaacgcggacccgtgtttcatttgaagcgggcatggcgcagctgggcgggaacgccctctttctaagccagaaagatctgcagctggggcgcggtgagactgtcgctgatacggcaaaagtgctgtcaggctatgtggatgccatcatgatccggacctttgaacatgaaaaggtggaggaacttgccaaagaagctgacattccggtgatcaatggacttaccgataaataccacccatgccaggcgctggcggatctcttgacgattaaggagataaaagggaagcttaaaggcgtaaaagtcgcatacatcggtgacggaaataacgtggcgcactccttgatgatcggctgcgcgaaaatgggctgtgatatctcgatcgcttcgccaaagggatatgaagtgttagatgaagcagctgaagcggcaaaaacatatgcacttcaatccggctcttctatcacgctgacagatgatccgattgaagctgtaaaagacgcggatgtgatttattctgatgtgtttacaagcatggggcaggaagcggaagagcaagaacgtcttgctgtctttgcgccttatcaggtgaatggggcgctagtcagccatgccaagcctgactatacatttttacattgtctccctgcgcatcgtgaggaagaagtgactgcggagattattgacgggccgaactctgcagtgttccagcaggcggaaaaccgtcttcatgtgcaaaaagcactgctgaaggccattttatataaaggggaatcatcaaaaaactgctgagccaaactcagcagtttttttgatggcaacatattcacagccgcttaggcgcatactacagcaaaaaggaaaaggaggaaaaacagtgggacagcagcaccaattccggcccggacagaaagcgcctaataacggtgtctacgtagaaatcggcgagacagggagcatggttaaaaaccctcaaaaggtccatctgtcagcaggggaaatgttccccgaaacatcaaaccacaaccggctgtggacctacaaaagaaagccgtgaccactaaaaaacccaaaacaataaatgttttgggtttttggctttttaatgctggcttgcatttttgttcataggcatgatttctgctaaaaccatgattaagacatacagtacaacagcaatgacagatgatgttttgaaattatacgtaacgctgttcatgcttgcaaccaagtagcatgccatatgtgataaaaggaacgtccaaataaaggcaataatatatcgcacgtttccacctcgtccttctcattctattctaaaagttatcataccatacaaaaagcgaagggggaatccaattttagcagaaagtgaggtgacaaaagagtctgattcgtcacactttaatggtaaaatataaaacgtcaatcagtataatagccaaaaatgtaaaaggctaggactttaccttattcgtttcttttctatttacataagatagcgtgagatgaagtgtgaaaggaggcgggcaagcgatgggaataacggaaagatactttcaactgggaacggagcataatgtcattcatctgccctatcgcccgaacggcttcggcatctttatcttgggggacagaacccactttgtcggacatgattcaagcttttggcagcagcattatggcagaaatcagcttctgagcatgttgatgaatgaaggatacactctttttaacagcaatctgttcggaaggcattggggggcggaaaaagcagtcacctatgccaaacagctgatacattctgtactgaagcaggaaatcctcaatccgaagattcatattttagcagaaggcatgggtgctctcgtggccgatgaactgcttcgtttttccccggatcatatccgctcagccgcaatgttgaatccttgtctcgatcttcaggcacattatgaatcggaaaaagaaaataaatttttctataaacaatttttgaaagaagtatcgaaaagctacggaatttctgaaaaagaagcggaagcgcttcgttataaaacaattcaaagctacccgagcggcgtaccggttcatatatggcagcgtatgaccggatctccatatccctacagtgtacatgcagaagttttcaaggaaaaacagcaaaagcaaggctcaccggtcgacatgacatttcatttatttgagcatccaagcagaatttatgcatcaatttgcaaattctttcacagtcatgaaaaagaattatagagaatataatgacaacagccttctcttttgcggaggctgttttgttttgggaaatgaaaaaccggaagggcggcagatgcaatggaatcaacgctgattgtaggtgcggacgaatttttcggcctttcattatgtgagcgaatgatggatgaaggcatacatgttgacgttgttctggcggaaacagaagataaaatgagacaaatgtacttagaagaaagactcatgtggcttgggagaaatgaactctttcgccagcttgaacacattggagaccaaaattatgatacaatttgtatccagttcggaagttttttgcctttagaccaatgtgattctccttatattttagtatatgaagaagaccgaaaagaatgggaaaaacgtgaaaaaacaggctcggaaaaaaccgtgatcctgccgaaaatgtatgggccatggaaagaagaaacagaggaagacggctattatacaaatgacgtcgctgacgagttgctgagattcctgttagaaccaagccgtcatagcaaagatcagctttttgaattgcaagtcacagaaaaaacctcaaaagaagaagcaaaaacaaaaattatcgagtggaaaagacaattttcatcaattttcgacaaatattaagaaaaaccttccatgtttcgagttttctagatacaataaacgtataaaaataaacatgttatagcttgtcaaaaggagttgaacatgacttgatcacaaggcttgtcatgatcttttctgtcctccttttattgagtggatgtggacaaactccgttcaaaggaaaaattgagaaggtcggcatgctctttcctgatacgattaatgacctcgtatggggcacaaaagggtataaaggattactgaatatacaatccaaatacaatgtggacgtctattataaagaaggcgttaaaacagaagaagatatcataaatgcgattgaggattttcataagaggggcgtcaatctgctctacggccatgggagtgaatatgccgaggtgtttaacttggtcggcgaagattatccagatatggaattcgtcatttccaatgcgaaagcgaaagctgataatgtaacaagtgtccattttagcggggaagcaatgggcttttttggaggaatgactgctgcccatatgtcgaaaacgaatcaggtcggtgtaattgcttcctttacgtggcagcctgaggttgacggttttatcaaaggggccaagtatgaaaatccggatatagaggtaaatacgaaatatacggatcattgggatgatgatacaacagcagtaaagctttatcagaaaatgaagaacgaaggcgcggatgttgtgtatcccgccggagacgggtataatgttcctgttattcagcaaatcaaaaaagacggtctttatgccattggctacgtcacagatcaatcggatctgggcgagaataccgtattaaccagcacggtgcaaaatgtggacaaggcctatgaaatcattgctgaacaatttaataaaggcacccttgagggcggcgatcattactacgacctgaatacgggagtcgttgagatgggaacattcagcccgctcgtcgacaaagactttcagcaaagaatcgccaagctgatcaaaacatacaacaaaacaggcgagctgccaaaaaacgagtaatggagtgacgtcacatgcagcacgaaaaatcacttgaattcttgcaaattgccatgaaatatctccctgaagcgaaagaacagcttgagaaatcaggcattgagctctcaatggaggccatccagccgtttatgaatctatttacaacggtaatggcggaagcttatgagcttggcaagtctgacgctaaatctgaaacagaataagaagaagccacttttttgaaagtggcttttcacatgattttctttttaatagcggagagcatgggcgcaagctcctttaaagcgggcttgatttgatcaagagagttcataattgaaccgatttggtccataatatgcatgtaattaatcgtctcttcgtcgtttgtctgagaaacctgagaaacttcctcttgttgttcctcctccttctcttctgttggttttgctgcatcgccgaacatcattcttgaaaacacatccaactgcatacgcctcctttccatataccatactctatgagtaagatgaactgatagtttagacgaatatattgccatgtgaaaaaaaataggatagaattagtacctgatactaataattgatcacaacctgattgatcttctaaatttaagatataaaggagtcttcccttatgaaagctggaatacttggtgttggacgttacattcctgagaaggttttaacaaatcatgatcttgaaaaaatggttgaaacttctgacgagtggattcgtacaagaacaggaatagaagaaagaagaatcgcagcagatgatgtgttttcatcacatatggctgttgcagcagcgaaaaatgcgctggaacaagctgaagtggctgctgaggatctggatatgatcttggttgcaactgttacacctgatcagtcatttcctacggtctcttgtatgattcaagaacagctcggcgcgaagaaagcgtgtgctatggatatcagcgcggcttgtgcgggcttcatgtacggggttgtaaccggtaaacaatttattgaatccggaacctacaagcatgttctagttgtcggtgtagagaagctctcaagcattaccgactgggaagaccgcaatacagccgttctgtttggagacggagcaggcgctgcggtagtcgggccagtcagtgatgacagaggaatcctttcatttgaactaggagccgacggcacaggcggtcagcacttgtatctgaatgaaaaacgacatacaatcatgaatggacgagaagttttcaaatttgcagtccgccaaatgggagaatcatgcgtaaatgtcattgaaaaagccggactttcaaaagaggatgtcgactttttgattccgcatcaggcgaacatccgtatcatggaagctgctcgcgagcgtttagagcttcctgtcgaaaagatgtctaaaactgttcataaatatggaaatacttctgccgcatccattccgatctctcttgtagaagaattggaagccggtaaaatcaaagacggcgatgtggtcgttatggtagggttcggcggaggactaacatggggcgccattgcaatccgctggggccgataaaaaaaggtgaggtgcacacaagatgactaaaaaaagagtagttgttacaggacttggagcattatctccacttggcaacgacgtcgatacaagttggaataacgcaatcaacggtgtgtccggaatcggtccgatcactcgtgttgacgctgaagaatatccggcaaaagttgccgctgaattaaaagaatttaatgttgaagattatatggataaaaaagaagccagaaaaatggaccgctttacacaatatgcggttgtggctgcaaaaatggcggttgaagatgcagagcttaacattaccgatgagatcgcgccgagagtcggtgtttgggtaggctccggtatcggaggacttgaaacactagagtctcaatttgaaatcttcttaacaaaaggcccaagacgggtaagcccgtttttcgtgccaatgatgattcctgacatggcgacaggccagatttctattgcattaggagcaaaaggggtgaattcttgtacggttacagcatgtgctacaggaacgaactccatcggtgacgcgtttaaggttattcagcgcggtgatgcagacgtgatggtcacaggcggaacagaagcgccgctgacaagaatgtcattcgccggctttagtgccaataaagcgctgtctactaatccagatccgaaaacagcgagccgcccgtttgataaaaaccgtgatggctttgtcatgggggaaggtgcagggattatcgttcttgaagaacttgagcatgccctggcccgcggcgctaaaatttacggagaaattgtcggctacggctcaaccggagacgcttatcatatcacagcgccggcccaagacggtgaaggcggagcgagagcgatgcaagaagccattaaagatgcaggcattgcacctgaagaaattgattacatcaatgctcacgggacaagcacgtattacaacgacaaatacgaaacaatggcgattaagaccgtttttggcgagcatgcgcataaacttgcggtaagctctacaaaatcgatgacaggccacctcttaggagcagccggcggtattgaagccattttctctatcctggccattaaagaaggcgtgattccgccgacaatcaatattcaaacacctgacgaagaatgtgatttggattatgtgcctgatgaagcccgcagacaggaacttaattatgttctcagcaactcattaggattcggcggacacaacgcaacattaatctttaaaaaatatcaatcataatcaagccaaaccggctgcccttaaagggtagccggttttttttgtgtgcataggattaaaagaggaggcgatcacatgagtgtagaacaaacatatagctggctcaggaaggccggttcaatagatgatttggcgcattacattatcccgcttttttcaggtgcggagaaaaagaactggaagggcattctggggcatcttcagcatcatgggatgtttaaaaacataaaagagggtattcagacggtttccaagctgaaggaaaaaggtttttacggacatatccaaaaggaagaacagtacctcaaaaacaaatggcaaggtcctgatgtaccaattgttacgctgccggttgatgaacgaaacaggagaatccgtttagaattcggatcaaaatcaggactcgcctttcaagacaaaatgttcctttttctttcgtcagatttagattttgggtcggtatctgcccttatgacgcatgagtatcatcacgtttgccggttaggtcatctgacaaaagaggaaaaggatgtcacattacttgatacaatcatcatggaagggctggcggaatatgctgtttatgagaggttcggccgaagtcaaacggctgaatggacgacttggtatacaccggaacagcttcaggctttatatgaaaaaaagattgcgccccatcgggatatcaaacgggataatcgattatttccccagctgttattcggcaaaggatatcagccaaaaatgcttggatacgcagttggattcaatattgtaaaaaaatatttaaccgccagcaaggcaagcaccgcagacgggctgtccattcctgctgagacctttttggatgcaatgctttaaaaggataaaataatggaatttcattaataatattacatttatcctaaaaaattcttgattttgcaaaatgattgtaataatatacaactataaaatttttcgataattcaatattatttattatttctgaataaagggattgctttctcttgaaaacgtttgacaacaagaggggggaaaggggagctagcatgagcacacttttagaagtgaataatttaaagacttattttttcaggaaaaaggagccgatccctgcggttgacggagtcgattttcacatcagcaaaggcgaaaccgtcgcgcttgtaggtgaatcgggctccggaaaaagcattacttctttatcaattatgggcctcgtccaaagctcaggcggaaaaatcatggacggctctattaaactcgaagacaaagacctcacctcattcactgaaaacgattattgcaaaatccgcggtaacgaagtatccatgatctttcaggaaccaatgacctcccttaatccggtgttaacaatcggagaacaaattaccgaagtgctgatttaccataaaaacatgaagaaaaaagaagcccgtcaacgagctgttgaactcttgcagatggtcggtttctcccgggcggagcaaattatgaaggagtacccgcatcggctgtccggcggtatgagacagagggtgatgattgccatcgcactgagctgtaatcctaaactgctcattgctgatgaaccaacgacagcgctggacgtgacaatacaagcccaggtgctggagctcatgaaagatctctgtcagaagttcaatacatcgattcttctcatcacacacgacttaggtgtcgtgtctgaagctgccgatagagtgattgtcatgtactgcggacaagtcgtagaaaacgccactgttgatgacttatttttagaaccgcttcatccgtatacagaaggcctgcttacgtcaattcctgttatagatggagagattgataaattaaatgcgattaaaggcagtgtgcctacaccggataatctgccgccggggtgccgttttgccccaaggtgcccgaaagctatggataagtgctggacaaatcagccttcgcttttgacacacaaaagcggaagaacggtgagatgctttttatatgaggaagagggtgccgaacaatcatgacagcagctaatcaagaaacaatcttagagcttcgtgacgtaaaaaaatactttccgatccggtcaggcctttttcaaagaaaagtcggtgatgtaaaagcggtggatggtgtttcattttcgttaaaaaaaggagaaacactcggaatcgttggagagtcgggctgcggaaaatcgactgccggcagaacgatgatcagactgtacaaaccgacagagggccaaattctttttaaagggcaggatatttccaatctgtcagaggagaagctgcggaagagtgtccgcaaaaatattcaaatggttttccaagatccatttgcttcgttaaacccgagaaagaccctgcgttccatcataaaggagccgtttaatacgcacaacatgtataccatgcgtgaacgaaacgaaaaagttgaagagctgcttgcaagagtagggcttcacccgtcgtttgccggccgttatccccatgagttttcaggcggccagcgtcagcggatcggcattgccagagcactcactttgaatccagagctgatcattgcagatgagccggtttccgcacttgatgtatccattcaggcccaagtgattaacttgatggaggaattacaggaagaatttaatcttacgtatctatttatctctcatgatctgagtgtcgtccgccatatcagcgacagagtcggagtaatgtatcttggcaaaatgatggaactgaccggcaagcatgagctttatgacaacccgcttcacccatatacccaagcgcttttatcctccgttccggttacaagaaaaagaggttctgtcaaacgtgaacgcattgtcctgaagggagaactgcctagtccggccaacccgccaaaaggctgcgtattccacacaagatgtcctgttgcaaaaccgatatgcaaggaacaaataccagaatttaaagaagctgctcccagccactttgtggcttgtcacctttatagctaatgttgcccgcacagctttgagagggggtatgcacactacataaacaacagcctagaagaacgaacatttcaagagggggaatatctaatgaaaagacggaaaaccgcactgatgatgctaagtgtattgatggttctggccatctttttatcagcctgctcgggatcaaaatcaagcaacagcagcgcgaaaaaatcagcaggcaaaccgcagcaaggcggggatttggttgttggttcaatcggagcgccaacacttttcaactcattatattcaacagatgaatcaagtacagatattgaacaaatgatttacagctttttaacgaaaaccgatgaaaacttaaatgtcaaaatgtcactggcggaaagtgtgaaagagctggatggcggattgaaatatgacgtaaaaatcaaaaaaggcgttaagttccatgacggagaagagcttactgccgatgatgtcgtctttacgtacagcattccgcttaacaaggattacaaaggagagcgcggctctaactttgaaatgctgaaatcagtagagaaaaagggagattatgaggttttatttacgctgaaatacaaagaccctaacttctataacaatacgttagacagctacgggattctgcctgagcacattttaaaagatgtaccggttgcagagcttgaagataacgaatttaatagaaaaaatccaatcggctcggggcctttcaaatttaaagaatggaaagacggacaatacgtgaagcttgttgctaatgatgactactatgacggccgtccgtatttagacagtgtcacgtataaaatcattcctgacgccaatgcagcagttgcccagcttcaggccggagatattgatttctttaacgtgccgtcaactgactataagacagctgaatcgtttaataatgtcaaagtcgtaacagatttagcgttaagctatacgtatatcggttggaatgagaaaaatgagctgtttaaagacaaaaaagtgcgccaggcgcttacgacagctttagaccgtgaaacaatggtgcaaaccgtattagatggggacgggaaggtcgcttatatccctgaaagcccggtttcatggaactatccgaaagatatagaggttcctaaatttgaatacaacgtcaaaaaagctaagaagatgctgaaagaagccggctgggaagatactgacggtgacggcatcctcgataaagacggtaaaaaattcgagtttacactgaaaacgaatcaaggaaataaagttcgtgaagacattgcagttgttgttcaagaacaattgaagaaagtcgggattaaggtaacgccgcaaatcgttgagtggagtgcattagtagaacagacaaatccacctaattgggactatgacgcaatggttttaggatggagtttatcaacgttcccagaccattacgatatcttccattctagccagtctgaaaaaggcttaaataacatgtggtacaaaaaccctgaagttgataagcttctcaaagatgcaaaatcaatcagtgaccgtaacgaatactcaaaagcttacgaaaagatttaccaaaaacttgctgaagatcagccgtataccttcctttactatccgaacaaccatatggcgatgccggctaacttagagggttatgtgtatcatccaaaacgcgagttgtaccaaattgaaaaatggtggcttgcccaataatttataattttcccttgcaggggagggagtgcgtttccttcccctttgaatttgaaaaagaacaacgaaggggacaagaatatggttacatatattattcgaagaacgttatcttcgattcctattcttttgggaattacaattttgtctttcattattatgaaagccgctccaggggacccgatgacacttatgatggatcctacgatcagccaggcagacagggctcagtttattgaaaagtacggtctcaatgaccctgagtatgttcaatatttaaaatggctgggcaatatggttcaaggcgatttcggcacatccatcatcagaaaagggacgcctgtttcagaactgattttagcacggctgcccaacacactcctcttgatgctggtgtcaacaattttggcgctgatcatttccatcccattcggggtaatttctgcaaaaaaaccttattcgaagctggactacggcattacatttacttcatttatcggtttggcaatcccgaatttttggttcggtttgattttaatcatggtgtttgccgtgaatctcggctggtttccaaccgggggagtcgccacccttaactcagatttcagtatagtagaccggattcatcatttgcttttacccgcttttgtgctggcgacagctgatatggcaggcttaacgagatatacaagatccaatatgcttgatgttttaaatcaagattatatccggactgctagatcaaaaggtttcaaagagaatcgagtattatttaagcacggcttgcggaatgcactattgcctgttattacgattttcggcttaatgattccttcctttattggcggagcggttgtcgtagagcagattttcacttggccgggattaggaaagctgtttgtcgattcagcattccagcgcgattatccggttatcatggcaatgactgtgatctcggcggttcttgtcgttgtcggaaacctcattgcagacatcctttacgcgattgttgatccgcggatcgaatattaaaaggagggaaacagagatgtcagagctgcaaacaactccctcgccggagatcaggctgaaagaaaatatttcgaaaaagccagaaacaatgacaaagattttctgggaaaaattctcgaaaaacaaactggccattttaggtgccgttattctttttatcattattatgtctgctgttttcgcccctttaattgcaccttatccccaagagcagcaaagcctgcttgataaatataaggcgccgggccttgaacatctgatgggaacggataaatttggacgtgatattttcagccggatcctatatggagcgcgtgtctctttattggttggatttgcgtccgtagtcggttcgattttgatcggaacggttttaggagcattagccggatatttcagaggaatagtggatgctgtcattatgcgtgtagttgacattgtgttatccattcctgatattttcttgttgatcacgctggtcaccatcttcaagccgggtgtggacaaactgattttaattttctgtctcacaggatggaccacaacagcacgattagtaaggggagaattcttgtcgctccgttcaagggaatatgttcttgctgctaaaacaattggaacaaaaacgcacaaaattattttttctcatatcctgcccaatgcgttagggccgattatcgtgtcagctacgctgaaagtagggtctgttattctagctgaatcggcgctaagctacttgggctttggaatccagccgccaatcgctagctgggggaacatgcttcaagacgcacagaatttcacagtaatgattcaagcatggtggtacccgttatttcccgggctatttattttaatgaccgttttatgcttcaactttgtcggtgatggcctgcgggatgcgcttgacccgaaaaatattaaataaaaatgaatatcatatctgttataaaatatcaccaaatcagaaaaaaagcaggtctccttttgtcagaaaatatacaaagagatctgctttttatgattcttacataaacccactgattccagatttcctcaatctctttggaataatttctctatcccttgcctatactgtggacaacagtttttataaaagtgaggggttagagatgttatttcttcatgatgtgtgggtcaattggtttgaaggggaagaaaatggctacaatgtatgccactttcacgaatggcgcaaggaagatacggttgagcttttggatcaggtgccgctgttaagggtgccgtcagtactgtttcattacatagaaaacgatttgtcagagcttccgaaaggtttgcttgaagacgtacatcagaaatcgtacattcggaaaaatcatgagcggacaaagcttgagtattgttttgtcgtaacagacggaatcggcattttagctgtcgacacgatcggctacacgatccctgtcagaaaaagccgtctgatcccaagacaggagcagctcgtttatgaaatggtaaaagatgtagagcctgaaacatatgaatttgagccaaagaagctggaatcctccaaggaatatcacatcttatcattagcaccagaacatgtcagaggactgacaagaaaagaacggcaaatcaagcagctgatgtttatggcgcttgaccaattaaaagggctgaaaaaccgggcggaaattggttactggtacacagagtggaatccgcatatgtatgaacaaatcaaaaggatgagctttgaagagatttgggacatgctgtataacgaaacaattgaaggctggtcggacaagcacctagctttttgcgaaaacctaataaaaggacagccttttttcgaaaagctttgggaaatggaaaacgaatcaaaggtcaactgaaaaaaaccgctctttgcaaagagcggttttttgattagcgtctttttcttccaagacccatggcattctccatttttttcagcattttgtttgctgtccggttcgcccgttccgcgccttcatcaagaatccggtctaattcttcagattctatcagctcataatagcggtcctggatcggttttaatgcgttcaccacgacttctgccaaatcacctttaaactcgccgtagccttttccttcgtactttgcttcaagctcttcaattgtcgtattgccgaggattgaataaattgtaagaaggttggaaacgcccggtttgttttccttatcaaatttgacaatgccttcagaatccgttacagcgcttttgattttcttttcaagctgcttcggctcatccagcagggtaatataagctttctggttcggatcagatttgctcatcttcttcagcggatcattcagagacatgatgcgtgcaccgacttttggaattttcacttccggaatcgtgaagatgtcgttgtattttttgttgaagcgttctgcgagattccgcgtcagctcaaggtgctgcttttgatcctcaccgacaggcacgagatccgttccgtacagcagaatatcagcggccattagcggcggatatgttaacaggccggagacgacagcttcattgcctttggatttgtccttaaattgagtcatccgctcaagctcgccgatatatgcgacacactgcatcatccatccggcctgcgcatgcgcggggacctctgactgaataaacaatgttgctttttctggatcaagtccgacagctaagtaaagcgctgcgagattgcggatattctttctaagctcaagccggtcttgaggaacagttatcgcatgctggtccacgatgcaaaaatagctgttataatcatgctgcagttcgacaaactgcttcattgcaccgatatagttgccgagcgtcactgagccgcttggctgaatgcctgaaaaaatcgtttgtttcatgaaaacatcaacctcatttcttaaaacataataaaaaaggctcattcttcccctgtaaaaaagggacgaatgaaccgtggtaccaccctgattattccattaaaatgaaatcactctgacgtttgtaacggagactgctccggctgagcctacttttttccagttcggtcagctgctccaaagtccattccacattgcccgttatctgctcccagcaccgcagactctcttcaaacaggtgaaatgtgtactactctttttcatagcaagcttttcttttgattgcttcattataaatcaattataaccaattgtcatcatgaaaaaacattcttttttccagtaaaattgtaataatataaataacacgagtgttgtaaaatccttaaatgataactgctatcagcgtaaaaacaggcagatattatatgtaaaaagcaatatgggcagaagacacatgaaaaagtttttaatcaatttatgctttaaatggtagaaggatattatgttcatggaagaaaaactaacgaagtttaaatattttaaattgataaaataatattgcaataaattatttgtttcattataatgaacttgttcactctattgttacagcttttttacaaaaataatcagaaaagacggaacagaataaaagtttgtgaaaactcaggttcatttgtctgatatttctgaggatttagccgtaaggagctgaaaattattattagggggtttgcgaatatgaaaaaacgttggtcgattgtcacgttgatgctcattttcactctcgtgctgagcgcgtgcggctttggcggcagcggatcaaacggtgaagggaaaaaggacagtaaaggaaagacgacacttaacattaatattaaaactgagccgttctccttacatccgggattggcaaatgattcagtttcaggcggtgtcatccgtcagacttttgaaggattgacacgcatcaatgcagatggggagcctgaagaaggcatggcatccaaaatcgaaacaagcaaggacggtaaaacatatacattcactattcgtgatggtgtgaaatggtctaatggagaccctgtaacagcacaagattttgaatatgcttggaaatgggcgcttgaccctaataatgaatcacaatacgcttaccagctctactacataaaaggtgctgaagcggcgaataccggaaaaggcagcctagacgatgtggcagtaaaagctgtgaatgacaaaacgctgaaggttgaattaaataacccgacgccatatttcactgaattaactgcgttctatacgtatatgccgatcaataagaaaattgcagagaaaaataaaaagtggaatacaaatgccggagatgattatgtatcaaacgggccgttcaaaatgacggcatggaaacacagcggttctattactctcgaaaaaaatgaccagtattgggataaagacaaagtcaaactgaagaaaatcgatatggttatgatcaacaataacaatacggaactaaaaaaattccaagctggcgaacttgattgggccggtttgccgctcgggcagcttccgacagaatctctcccttccttgaaaaaagacggttctttacatgttgagccgatggcaggtgtgtattggtacaaattcaacactgaagctaagccgttagacaacgtcaatatccgtaaagcattatcttatgcgattgaccgtcaatcgattgttaaaaacattacgcaaggtgaacaaatcccggctatggctgcggtgccgccgacaatgaagggatttgaggataacaaagaaggctactacaaagacaacgatgttaaaacggcaaaagaataccttgaaaaaggcctaaaagaaatgggcttaagcaaggcatctgaccttccgaaaatcaaattgtcttataacactgatgatgcacatgcgaaaatcgctcaagctgtacaagaaatgtggaagaaaaatttaggcgttgatgttgagcttgataactcagaatggaatgtctatattgataagctccacagccaagattatcaaatcggccgtatgggctggcttggggacttcaatgatcctatcaacttcctagaattgttccgtgacaaagacggaggaaataacgatacaggctgggaaaacccagaattcaaaaaattgctgaatcagtcacaaactgaaacagatcaaaacaaacgtgcagagctgctgaaaaaagcggaaggtattttcattgatgaaatgccggtagctccaatttatttttatacgattccttgggtacaagacgaaaatctgaaaggaactattattactggaactggagaaatttacttcagaaacgcgtactttcaataagtcttatttgtgaaaacaataacctcaaggtatatggggacctatttcccatatacctttcttactgaggaatataaaaaagtaaaaaccatggaggtgttcccccttgctaaaatatatcggaagacgcttagtctatatgattatcacactatttgtgattgtaactgtgacattcttcttaatgcaagcagcaccgggcgggccattttcaggtgagaaaaagcttccgcctgaaattgaagcaaacttaaatacgcactatggcttggacaagccgctgtttgtacaatatgtcagttatttgaaatcagttgcaatgtgggatttcggaccgtcatttaaatataaaggtcagagtgttaacgacctgatcagttcaggtttccccgtttcatttactcttggagcagaagctattctcctcgctttagcattaggtgtattgtttggagtcattgcagctctttaccataataagtggcaggattataccgtcgcgattttaacgatatttggtatttcggttccgagctttatcatggcggctgttctgcaatatgtgttctccatgaagcttgggctgtttccggtcgcggggtgggattcctgggcatacacctttttgccttcaatcgcacttgcttccatgccgatggcgtttattgccagactttcccgttcaagcatgatcgaagtgttaaacagtgattatatccgcacagcgaaagcgaaagggctgtcccgcccagcggttacagtgcggcacgccattcgaaacgcgcttttgccggttgttacatatatgggcccgatggccgcacaggtcttaacggggagcttcattattgaaaccatttttggtatccccgggcttggtgcacacttcgtcaacagtattacaaaccgtgattatacggtcattatgggtgtaacggtgttcttcagtgtcatcctgctattgtgtgtattaattgtagatgtgttatacggcattattgatccaagaatcaagctttccaaagcaaagaaaggagcctaggccatgcagaacattccaaaaaacatgtttgaaccagccgcagcgaatgccggcgatgcagaaaaaataagtaaaaagagcctttccctctggaaagatgcgatgcttcgcttccgcagcaataagcttgcaatggtcgggcttatcattatcgtacttattatccttatggcaatttttgcgccgatgttctcaaggtatgattattcaactactaatctcttaaatgcggataagccgccttcaaaagatcactggttcggaacagatgatcttggacgggacattttcgtccgtacatgggtaggggcgcgtatctcaatctttatcggtgttgcagctgctgttctcgatttgctgatcggcgttatttgggggagcatttcaggcttccgcggaggcagaacggacgaaatcatgatgcgtatcgctgatatcctttgggcagttccttcattattaatggttatcttactgatggttgttcttccgaaaggtctatttacgattattattgccatgacgattacaggctggattaatatggccagaatcgtgcgcggacaagtgctgcagctgaagaatcaggagtatgtgcttgcttcacagacactgggtgcaaaaacatcccgtcttctgtttaaacatatcgtgccaaacgcaatgggttctattttggtcacgatgacactgacagttcctactgcaattttcacagaagcctttttaagttatttgggacttggtgttccggctccgctggcgagctggggaacgatggcttctgacggattgcctgcattgacctattatccgtggcgtttattcttccctgccggatttatctgcattacaatgtttggtttcaacgttgtcggcgacggattaagagacgcattggatcctaagttacgtaaataagggagtgatacgggtgacacgcctattagaagtaaaagatttagcaatttcatttaaaacatatggcggagaggtccaggcgatccgcggagtgaatttccatctggataaaggggagacgctggccattgttggagaatcaggttccggaaaaagtgtaacctctcaagcgattatgaagctgattccaatgcctccgggttatttcaaacgcggtgagatcctgtttgaaggaaaggatctggtgccgctgtccgaaaaagaaatgcaaaatgtccgaggaaaagagatcggcatgatatttcaggatccgatgacctccttaaatccaacgatgaaggtcggtaaacaaattacggaagtgctttttaaacacgaaaagatctcgaaggaagcggctaaaaaacgcgcggttgaactgctggaattagtcggtatcccaatgccggaaaagcgggtgaaccaatttccgcatgaattttcaggcgggatgagacagagggttgtcattgccatggcgcttgcagcgaatccgaaacttctgatcgccgatgagccgacaactgctcttgatgtaacgattcaagcgcaaattttggaattaatgaaggatttgcaaaagaaaattgacacgtccatcatctttatcacacacgatcttggtgttgtggctaacgttgctgaccgggtcgctgtcatgtacgcgggacagattgtagaaaccggtacggtagacgaaatcttctacgatccgagacatccgtacacttgggggcttcttgcatccatgccgacactggaaagttcaggagaggaagagctgactgcaattccgggcacgccgcctgatttgacaaacccgccaaaaggagatgcttttgccctgcggagctcttacgcgatgaaaatcgattttgaacaggagccgccaatgtttaaggtatccgatactcattatgtaaaatcgtggctgcttcatcctgacgcgccaaaggtagagccgcctgaagcggtaaaagcgaaaatgcgtaaactggcaaatacgtatgaaaaacctgtcttagtgagagaaggtgaatgaattgactgaaaaattattagaaatcaaacatttaaaacagcactttgtcacaccaaggggaacggtcaaggctgtagatgatttatcatttgatatctataaaggtgaaacattagggctggttggtgaatcaggctgcggtaaatcgacaacaggccgaagcattatccggctgtacgaagcaaccgatggtgaggtgctgttcaacggcgaaaatgtgcacgggagaaaatcgcggaaaaagctgctggaattcaaccgcaaaatgcagatgattttccaagacccatatgcatccctgaatccgagaatgacagttgctgatattattgctgaaggccttgatattcataagctggcgaaaacgaaaaaagagcggatgcagagggtccatgaactattggaaacagttggtttaaacaaggaacacgcgaaccgttatccgcatgaattttccggcggccagcgccaaagaatcgggattgccagagctcttgctgttgatccggaattcattatcgcggatgagccgatttccgctttggatgtatccattcaagcgcaggtcgtgaatttaatgaaagaactgcaaaaagaaaaagggctcacatatctgtttattgcccacgatttatcgatggtcaaatacatcagtgaccgcattggcgtcatgtatttcgggaaactggttgagcttgcgccggcagatgagctttatgaaaatccgcttcacccatatacaaaatcattgctttctgctattcctcttcctgatccggactatgagagaaatcgcgttcgccagaaatatgatccgtctgtccatcaattaaaggatggggaaacgatggaattccgtgaagtcaaaccgggacattttgtgatgtgcacggaagccgaatttaaagctttttcatgattcatcaatccttcaagagatttctcttgaagggtttttttgcgtcctcatagaaagtgagaatgataacatttacaattagaggaaaaaagcggaggcgaaatacgattcaatttctgcataacaaaaatgtttttgcgctattgctgtctcaatcttttcaatctttagcaggtgtcctcgtcacaatcgttttaatggtccgggtctatcaaatgactgactccgtttttttggcgggccttattttatcgttcatgtcgtttgcgagtatagcagcaagcttttgcgtctctccggtgcttcgcattctcggttttaaaaaggtgcttgcgggagcgaatctgctgagagcggtctttacaatcctgatggcatacagcgtcactcatcacggacaggcattcttttggattacgctgctgtttgtgttttgtttttccttcgcgggcgctttttttcagccggcaagatttgcgctgctgccgattattgttccaaagaagcaatatgtaaaagcgaatggtgtgatctccctctcgaatcaattgttcttaacagcaggctggggccttggaggccttctgacgtacgccgttccttttgaactcgttgtcggcgctgccatttgcctgtttgttctatcgggagcttccatcagtgtgttgcatgtaaatgaagaagaggctgcaggaactgctgaaacagcatctgtcagaagtatatggaaggatttaatgatcatccctattgtaagagacattactgtaatggacatgttagaagctttggcgggttccgtatggtcatctgctattctcctcgcatttactgcggctgttttgcatgaaacagaggtgtggtgggggatgtttaacgcttcctattttataggcgcaattgtcggcagtgtgattgctattcgtttttcttctttttttgagcggaatatgggctatgccattatgttcagctcgcttgtaatgtcggcgctgacccttttgttttcattttctccagtcccatttttatgcgctctggcttgtgctgcaatggggcctttttatcaggtgcgtgatatttgccaggaaaccatgctgcaggaggttattcccgagcagaaacgaatcggaatcatggctgcaaaaaatgcgattttgactccttggtcaggcgtcacctactccattatggggctagtggctgatgctgctggtgcgaaaatagcttttatcgcggctgctgcattatatatcatgacatttctgattgcactggcgcagccccgcctgattcattacaggcgggaaaaccgagttcaatgagatacacttcaaaatgaacggagcagctggctccgtttttgctgaaaaaaaatgaaaccatggcggaagttcgcacgtctttatagatgtaaggctgtttaaacaagaagaaatggggtatatctaaaagtatgaagacaacgaactcataaggagcaaatcaatgaactggtatgaaaagcttagcgagtactttccaattgaagaaatgaaatcaaaagcgcatatggaagctcttctgaaagagcgaagcgatatttatcataaagatgaaggcaaacatcatattttaatgtttgcggagttcgattcttttatcttcgttgattatctgtatgtgtctaaggatgcaagagggcaggggcttggcggcaaattgatcgcgaagctgaaaaagaaaaataagcccatattgctcgaggtggaacctgtggatgaagatgatactgatacagaaaaacgcctgaggttttatcaaagagagcatttcaagcatgctcagtcaattgggtaccggcgccggtcattggctacgaatgaagtaaacaagatggagattctgtactggtcaccaaaaacagaatcagaagaagaaattcttgaagccatgaaacagacatatgaaaacattcatacttataaagacgagaaatggtacggagaatcgtacgaaaaaacggatgaagtcctgaaactcattgatgaagaaaaacaaaaaaatattttcgatcagttaagctaattgagaattagaacatatcatgaacattaaaaatttgctggattgacacatttttttcttaggatactgttcacacttacttttttatagtataatacctgtaaagattccttttttagagtaatttcaatttaagaataaaatagatgttcatcctactaattagaggagtgaagatgaatggttacactatacacatcaccaagctgtacttcatgcagaaaggcgagagcgtggctcgaggagcacgatattccatttgtagaaagaaacattttctctgaacctttatcaattgatgaaataaaacaaattcttcgaatgactgaggatggaacagatgaaatcatctcaacccgttcaaaagtattccaaaaactgaatgtgaacgttgaatctatgccgctgcaagatttgtaccgcttgatcaacgagcatccagggttgcttcgccgtccgatcatcattgacgaaaaacgtttgcaggtcggatataacgaagacgaaatcagacgtttcctgccaagaaaagttcgctctttccaattaagagaagcacagcgtttggcaaactaatagatcgtatcatcaaaagaaggctgagtcatcagccttcttttatttttcaacctgctggtaataaatgctcgcaagaatgacaaacgcaaccgtcaaaatggggaggagcgtttcaactgtgccgtgctgcgccataaaaagagacagctttttgtctctgacaatcatttctccgccagtataagcaagcagcccgcttcccgcgtaaatcagaagcggtattttctctagtgcaatatggatgagtttgctgccccaaataataaccggaaccgatacacacaaacctataacaacgagagaaaactcaccgtgtgatgctcccgcaactgcgatgacgttgtccagcgacataaagagatctgcaagcacaatcgttcgtatcgctctccacagggaggtgctgcttttaatgtgcttcgtgtcttttttttcaatcagcagctgatatcctaaatacagcaggaaaattccgccggcgcactgcaagaacggaatgttcaaaagatatacagctgcacttgttaatccgattctcatggcaacggcaataaatgttccgagaataatggcttgctgtctttgcttgtccggcaaatgtctgctggccatggcaataacaaccgcgttgtctccgccgaggatcaggtcaatcccaacaatgacaagcagagaaatcagatagtcatgctccatgaagcggcacctcgctttcagtccttcgcttgtactactactatatgagacaggttgtattttatgatatcagccgcctgaactgccgttttttaggaaaaggtgcatttttatttcttttgtgactgttttatcataaaatagaaatacaaaggaattcacactggccttggttaaggttaagatgtggacggaatgggtaaagtgtagtaaagtacaattaatcgggagcttagatgtcccttcaacatcttatatagaagggaaggttggcaaatggaaattgaaagaattaacgagcatacagtaaaattttatatgtcttacggagatattgaagatcgcggttttgacagagaagaaatttggtataaccgtgagcgcagtgaagaacttttctgggaagtcatggatgaagttcatgaagaagaggaattcgctgtggaaggcccactttggattcaagttcaggcactggacaaaggattagaaatcatcgtcacaaaagcccagctttccaaagacggacaaaagctcgaactgccgattcctgaggataaaaagcaagaaccagcatctgaggatcttgacgccttgctggatgatttccagaaagaagagcaagccgtcaatcaggaagagaaggagcaaaagcttcaatttgtcttgcgatttggcgattttgaggatgttatttctctatctaatttgaacgttaacggaagcaaaacgactttatattcgtttgagaaccgatattatttatatgtagatttttgcaatatgactgatgaagaggttgaaaatcagctaagcatcctgctggagtacgcaaatgaatcctcaatcagcatacaccgtcttgaagagtacggcaagctgattatttcagagcatgctctagaaacgataaaaaaacactttgcatcatagcaaaccgatttccttccggaaatcggttttttttatgcacgaaaatgccattttagagatgtgaaaaatcaaaaacatatagacaagcggaaaatacagcgaacaggagttgatcatcttttccagaaagtatacttcatctggaaaggagagatgacaattgtttagtgctgtgactgaagacggccaaatgtttcaccttctaggcgctcagcaaaaccagaaattaaagcggagacggttcttctgtccggtatgcgggggagagctagctgtgaagctcggacttcaaaaagcgccgcattttgcccataaacagaacaagtcctgctccatagatatcgaaccggaaagcgcctaccacttagaaggaaaaagacagttgtatgtatggctgaaaacgcaacgggcttcaccaatattggagccgtatataaagacaatcaaccaaagaccagacgtcatggcaaggatcaaggagcatatgcttgctgttgaatatcaatgcgccactatcgctccagatgtctttcaaaagcggacagagggcttcaaacaagaaggaatcatcccgcagtggattatgggatacagccgcttaaaacggactgcttcgtccttttatcagctttcagcttttcattggcagtttatcaatgcaagtccatacagagaactgatatgttattgtcctgaaaggcgttcttttctccgactcagccacatcattccattctacacaaaccattcttattcctcagtccaaacgatccctatccatcgggcaggtgcagacgatctttttttcactgaaccgaaaccctcaattcaatattcaggctggacgaaagcgattcaccgttttcgccataaaccccatcggtttaactctaaggaaacaaatcgccttaggcagatgttttatgagaagcggcagacatctttttcttttctgccgactgaagtgtttgttcctgttagaaaaggggcagtttttaagagtccggtttttgtgtggcaggggtttctttatttgtttatgacggatcttggagataaacgtgcgccaattcgtttttcagctgttttgcagcagtgcaaactgcacattcataaaaagaacattgcactcaggttcgaatgcagcgaagagtgtctttcagaagcggttaaacagtatattgattttttgtgcaagaagggatttttaagggagactcagaaagaagtatatgtgctgaatcggcctgcaggcggcatacattcaatgcaggatctcatagaaagagaccgcagctgttttatagaatgagtttgtctgatttggctcaccctaagacaaaggtggtgggcaggctgtgaaaggcacaaaaggaaaggtttttcgtgtttttactgcttttttggcattcgttctcttcattactgcatatgatttgacaaaaggcagtgaaaaaccggaagatattcacaacacaagtttattgagaaacagctgttttttcaattggcttgaatcaaagaagacgagggggatcaccatggctgaggaaaaaaaagcaaaccaactgcctgacagaagtgaggtaaaggcagaagacacatggagacttgaggatatttttcctagtgatgaggcctggaataaagaatttcaagctgtaaaagaattaattccgaatttatctaagtataaaggaaagctggcagattcagctgatcatttatacgaggctcttacgtatcaagataaagtgatggagcggctgggtaggctgtacacatatgcgcatatgcgctctgaccaggatactgggaactccttttaccaggggctgaatgacaaggcgggaaacctgtatacacaggccgcaagcgcgacagcttatttggttccggagattttatccatagaagaagacaaactgcagcagttcattcttgaaaaagaagaattgaagctgtactctcatgcgattgaggagattacaaaggaacgtccgcatgtgctgagcgagaaggaagaggcactgcttgctgaagcctccgaggtactggggtcatcttcaaatacattcagcgtgttaaataacgcagatataacgtttccgtccattaaagacgaagatgggaatgaaaaacagatcactcacggcaactttattaatttcttggaaagtgaaaaccgtgaagttcgcaaaaatgcgtttgacgcagtgtataaaacgtacggacaatataaaaacacaatggccacgacgctaagcggcactgtgaaaaaggacaacttctacgcgagagtgaaaaagtacaagtcagcgcgtgaggctgcgctttctaacaacagtattcctgaggaagtatacgataaccttgttaagacgattaataagcatttgccgctcctgcaccgctatattgcgctaagaaagaaagtgcttgagcttgatgaagtgcatatctatgacctgtatacaccgcttgtgaaagatgcggggatgaaggtgacatacgaggaagccaaagattacatgctgaaaggcctcgcacctttaggggaagaatatgcctctatcctaaaagaaggactggaaaaccgctgggtggacgtttacgaaaataaaggcaaacgcaatggggcttattcatcaggagcttacggcacgaatccgtatattttgatgaactggcataataacgtcaataatctctttacgctcgtgcacgagtttggacattccgtacacagctactatacgagaaagcaccagccttatccatatggcaattacagtatctttgtcgcggaagttgcctctacgacaaatgaagcgctccttggcgaatatttgctgaacaatttagaggatgaaaaacagcgcttatatattctcaaccatatgcttgagggcttcaggggaacggtcttcagacaaacgatgttcgctgaatttgaacatctgatccatacaaaggcgcaagaaggcgagccgcttacacctgagcttctgacaaatgtctattacgacctgaataaaaagtattttggagacggcatggtgattgataaggaaatcggccttgaatggtcgcgtattccgcacttctattacaattactatgtgtatcagtatgcgacagggtacagcgctgcccaagcattaagcagccagattttgaaggaaggaaagccggcggttgaccgttatattgacttcctgaaagcgggaagttcacaatacccgattgatgtcttgaaaaaagcgggtgttgatatgacgtctccagagccaatcgaagccgcgtgcaaaatgtttgaagaaaaacttgatgaaatggaagagctgctgatgaaagtcaagcagtcttaaaaagtaagcctgtgcggaaatgacgcacaggcttttttaaaaccctttaaaggttttccggtgattcaagcggtagagggtaaacaaaatagacagaaacagcagaggagaggtaatataaagcggcagcatatgcatcatgcctaagatattcagacagaaaaaaacggcaatgcacacaattgagatcaaagtagacatcatggcgatcctcctcgtcctttttccttataaggatatgagtgaatgcacttcgttatgttttgtgacaaaaatatgaacattaagcatagaggttgtcaaaagtcgacatcttttgttatcataaggatgtgaaattgatcacaaacaaacattacccctttgtttgaccgtgaaaaatttctcccatcccctttgttgtcgttaagacatatgaaaccgcgcttatcccggcgcggtttctttagtgctaaaaacagaacgtacgtttggttatggcgtaaaaaaacagcctcaagcatatgcacgcctgcggctatttttcacatgattgatattcatcagaataagtgctgagagacttccaaaacattccgtgtttggcttccactttggcaacctttttagcaaacgccagttttttcatttctttttctacctcttcaaggctcaggtcatatacaagagcaatttccttcgaggcaacgaagcggaaatattcaataaaacattctaaaggcggtgtttccgacggcttcggctcgtcgccaagcatctcaaataaaatttcttcatatacatcatatgagtagctgccaggaactttaagcccttcatcctcatgctgcgtattaaaaaacgtcagtgtcggattaacagaaacatccatctcagcagcaattttcatgtcacattgaagcgccttgaccgcgctttgagaatgcagatcttttttgaattcttcaagatcgagacttgtattttcagcaatctccaaaagcacgttttcatccgtaatatttttctttgaaacaaataggctctcctgcatatttctgagaaattgcatgccggcttttcgtccttgcaattcggctgctttaaaagcgagagcagccatataaggcgatgaaagcggctgatcctgttcgaaccagacattgccgtcacatgacatgccagagcggctcgcgatcttttcccatgcttctgcgagaagatgcttttttcgctttttatttaaagcggtaaggcttgcggaagcgataatgcgtaaggtgaaaaaacgtccgtatctgattttcagctttttgatgacgggctctaaggaccagcattcaggacataaagggtctacaaacatataaatttcaagcggtttttttggatgaccgtggcaatgggcgaagtatagctcatgctgatagtttgtcaagatgatcgatcctccgcttccgtttgattcaccatatgccttgctgtcaactccagccggccaaacaaaaactcacgaatttcgccctccagccctacatggtacattgcgtccttcatacagctgagccacgcatcagctctctcgtttgtaattggaaagggaagatgccttgctctgagcataggatggccgtgctcctcagtataaagcggaggcccgcctaaatactgagttaagaattgcttctgtttcctggcggtttctgtcaaatcgcttggaaaaatcggcttcagcaaaggatgagacgcgacacgctcataaaaagtatcaacaagttgcgatagaagttcctctccaatcgcttcataaggtgcgttaaacgattgtcccatgttgactactcctttaaatatggctaataggaatcataaatcctattgcaaaaagtaattttctgtatttcattgtttcatctagatttattttagcaacaaggcatcatttctacaaacaaactgccttttatgcgtttgatgacttatttcggctgacagccggggtttgtatttcatatcatatcacataaaaatcaggaatgcgtaagatttcacttcgcaaaaaaaccagagggaaagagcacctctggttacgcgtaataagctgaagttattttttttacatagttttgcgtttcttggaaaggaggaatgcctccgtatcggtcaacattccccggtccggcgttgtaagccgctaatgccatagacacattgccgtcgtatttatccagcatttgttttaaatatttcgttccgccctccacattttgctgcggatcaagcggattggaaacgccaagtgagcttgctgttgacggcatcagctgcatgaggcccatcgcacctactccgctgaccgcttttgcattaaagcctgattcctgtttgatgacggcgcggatcagtttttcatcaacgccatatttatcagcggcttttttaatcgcactgtcaatagaaaagtctcccgaactgatctgatttgctccatgtttgtttgaagctgaatctgcagcagctgtttcagtgctttctgccgcttttgtgattgaacctgaattgctgctcgtatatgagttaagcccatacgctgaaagcagtgacggcgctgttgtattcccgctgttcagcatgttgagcgggcttggcgatgaagaaggtgctgattgctgagatgccagaccgtttgtatattggctgagcaaagagctaaaacttgaaagcgggctttccgtattctgagtgtccgagctgctgcgtgcattagatatggactgtagtgcctgaagctgaagtaaagctgcccaattcgttacattcacgatgtcattccaccttatatagactttcgtttttcttcataaaaacgcagaattttatttttggtttcgcgctgaggaatgctgaattgctgaagcagcttctcgaaagcttttctgccctcatgccaatccgccgcctcaaattcaatttcatagtcctctttatttaaatatcggctgtggtctaaaactattaagcctttttctgtttctttttccgcacggtttgttgctaaagatccaaagtattgaatggcatccgtatcgatctgaagcttgtgcagctggtccttcacagggccctcgggaactgaaaatccagcgagatctgatacctctgaaagctgctggtgcgtttccagaagccccacatcagccggctcctttaatgtaaggacatactttccgttttttctgcggatacgaagcgcagcttgtttttgtttcagcgcgaagctgtctgtatcaaaataatgattcttttgatctgtaaaatctttttctgtcagctggagtgccgctgctatgtttttgaattcttgtttggtcagcatgtttttaaattcgatttcaatttcttggctcatgatgctcttcctttcctccctgtaaatcttatttttactattatctctttagatgttaggtttatcaatatcgagctcgatatgataaaatgaatctgtactttgtttaaaaaaggagagcattatgcaaaacagaatcgaaattttgaatgcaacattatcggatgatcagcttcgccttgcctgtcagacagaaggaaacgaagcggaacgcaagccgtcaggtcaaatgcttgttgattctgaccactttgcttttgtatacatacttgaattagctgattcttttgaatatgtcattataaaggaacatgtatggccggaactgaagcaggcccatgcacaaaaaataccggttgttttagaggcaggagaccaaacaattgaactggcaggcctgcatgaggagctggaatatcttttagaaaatataaaagataatgcaaactatggagaagaaatggaagaaaaagtgaaacgcgtgtttttatagaaactggttcggaattgggggatgtatgatggatgacaaacaatgggagcgttttttagtgccgtaccgccaggctgtcgaagagttgaaagtgaagctcaaggggatccgcacactatatgaatacgaggacgaccattcaccgatcgaatttgtgaccggacgcgtcaagcctgtggcgagcatacttgaaaaagcgagacggaaaagcataccgctgcatgaaattgaaaccatgcaggacattgctggccttagaatcatgtgccaatttgtcgatgacatccaaatcgtaaaagagatgctttttgccagaaaagatttcaccgttgtggatcagagggattatattgcggaacataaagagagcggataccgatcataccatcttgttgtgctgtaccctttgcagacggtatccggagaaaagcatgttctcgtagaaatacagatccgtacactggcgatgaatttttgggcgaccattgagcattcattgaattataaatacagcggaaacattcctgaaaaagtaaaactaaggcttcagcgcgcttctgaagcggcttcccggcttgatgaagagatgtcggagatcaggggtgaagtacaggaagctcaagctgccttttcaagaaagaaaaaaggaagcgagcaacaataggtaaaggggaagaagagcatgaaatttgccgtatcatcaaaaggagatcaagtttctgatacgctgaaaagcaaaatacaggcgtatttattggattttgatatggaactggatgaaaatgaaccggaaatcgttatttcagtcggaggcgacggaacgcttttgtatgcttttcacagatacagcgaccgcttggacaaaacagcatttgtcggcgttcacacaggtcatctgggtttttatgccgactgggttcctcatgaaattgaaaaacttgttcttgccatcgcgaaaacgccgtatcatacagtcgaatatccgcttctcgaagtcattgtgacctatcacgaaaacgagcgggaagaaagatacttagctttgaatgaatgtacgattaaaagcatcgaaggaagccttgttgctgatgtggaaatcaaagggcagctctttgaaaccttccgaggcgacggcctctgcctgtcaactccatcaggcagcacagcctacaataaggcgctgggcggagcgattatccatccgtctatcagggcgatccagcttgcggaaatggcttctattaataaccgcgtgttccgtacggtcgggtcacctctgcttctcccatcccatcatgattgcatgattaagccgagaaacgaagttgactttcaagtgacgattgaccatttaacccttctccataaggatgtaaagtcgatccgctgccaagttgcatccgaaaaagtgcggtttgcgagattccgtccgtttccattttggaaaagagtccaggattcgtttattggaaaaggtgaatagaaagaggacatatcgtggagcatttttttatcagaaagaacattacttccgctgaggacgggatgactgtaaaagaatatgccagtgaactgggaatttcgaaacgtctgctgaccgatattaagtttggcgggggagacctgcagattaacggtgagcatgtgacggtcaaatacgttttgaaagatggagatcttcttatcgtgaagtttcctgaggagcaggtgagcgagacgctgttggcagagcctgttccgctcgatatcctttatgaggatgaacatgtgcttgtgataaacaagcagccgtatgtgtcatcaatcccttcgagagagcacccctccggcagcattgccaatggaattattgatcattatcaaacaaccggagtgagggcgacagttcatcttgtcacccggttagaccgggatacatcaggtgtcatgcttgttgccaagcatcgatttgcccactccattttatcgtctgcgcaaaaaaacggccttgtgaaacgccggtatgcggcagtggttcacgggcggatggcacagatggagggaacagtcgatgctccgattggcagacatcctgacagtattattgaacggacggtaacgccagacggccagaaggctgttactcatttttacgtcacatgtgcaaatgacgacatgacctcggtggcattgcagcttgagactggacgaacccatcaaattcgtgttcatatgagttatctcgggcacccgttgtgcggcgatacactgtacggcggaacgagacaggaaattgaccggcaggctctgcacagcgagcatctttcgtttatccatccgctgacacaggagaacatgacgtttcatgctccactgcctcaggatatgagaaaactgataaaaggagagaatcattgattctctccttttttatatggggcgaaatcttgattcgtcgtaaggcagggagcttggaacagagacggtttctatttctggaaagcgaaagcctgtcagttgatttccgaacacgcagcctgtatcaatgttgatggtgcgattgaccttccgaggctctttcacaggtgtatgaccgtataccacccaagcctttccgttataggctgccgcccaatcacgtctgacgggtctgccgtccggatatgtttcacccgtcacgtcaccgtaaagcacaaagtccttcactctgcgggtatatttgccgatatcgtcagctcttatgccagcatgggcgacaactaattctccattatgtaagatgtcgtaaagcggcgctgtttcgtacagcttcataaactgttcgctgactgattttttctcatctttggaaagttcctcaagctctgccgctgttgtttcgagaccatgcatcacttttaccggatttccttttaagtaacgatataatttattgcaatggtttcccgggacataacgcacagcgcctttttcgtaagcgccggctacaaatcggatgacctctatcgatttgggccctctgtcagttaaatctccggcaaaaacaagcaccctgccttcttcatggacaggtactccatttttgattgtatagccaagcttttggattaatgcagtcatttcgtcatagcagccatgaatatcgctgatgatatcgtaagccatgcggtctcctccttaccgattgttttatttattatgaagcaaagtgttgtgagtcatcacaagcttttatgtgcaaattatagaagaagaatcattttctaaacaggattaagaccttatcactttatttttcatcatcacccttgttaaaatcgcgttatgttttttaaaaatgaggttttgttctctgagtgagaactagcataaccctgacttaaaaaggaggttctgattatggcgcatacatctgtcgcatctttagttgttgtacttatcgttgcatttttgacacccatccttttgcatcggtttaaactcagcatcccggttgttgttgctgaaatcattatggggctgataattgggaaaagcggccttaatttagttgtggagggtgacacctggctccagacactctctatgctcggatttatctttttaatgtttttaagcgggcttgaaattgatttttcgtcgtttgagaaaggaaagaaaaagcagttcctgccgaatggcaaggaagcgccgaatacgtttgctgcggcatctgttattttcgtcggtatttttattttatcattgctcttgtcctatgggttcgtcttggccggatttatccaaaatgcatttttgatgaccctgattatttcaacgatttcattaggcgttgtcgttccaacattaaaagaagaacggatcatgaattcgaatatcgggcagattattttgcttgttgctgttattgctgatttggccacgatgattcttcttgctgttttttcttctttatacggagaggacagcggaaacatgtggctcctgatgattctgtttgcggccggagtggtgctttactttttcggccgggtcttcaaacatcgctcttttgttcaatccatgtcaaaagggacgatccagatcgggacgcgtgccatttttacgttaatcattgtactcgttgccctgtctgaatcacttggggcggaaaatattctcggcgctttcttagcgggggttcttgtttccctgctttcgccaaacaaagaacttgttcagcagctggattcattcggttatgggttcttaataccgattttcttcgtgatggtcggtgtgaagcttgatatttggactcttttccaggataaaacaattttaatcatgattccgctcctgctgctggcgctgttagtcagcaaaatcattcctgtcatgtacttaaagaagtggtatgataaccgaaccattttcgcgtctggtttcctgctgacatcaacgctttcgctcgtgattgccgctgcaacaatcggccagcagcttcacgtgatcagtgcaaatatgtcaggagcgctaattttagtagccgtcattgcaagtatttttacgccgatctgttttaaaaaattatacaaacgggaagagcagccggaggagaaaaagacgattacgttcattggcgccaatcaaatgactttgcctgtcacactcgaattgccagaggaagagtatgacgtgcgtgttgtacacgtctaccaagagaatgcggaggaaaagctgtcagaatcagtgtttgctgttgaaacaatttctgactatgaacacgagacgcttgaatcactcggcatttttgaaacggatatcctcgttgtggcgacaggaaatgaagatatgaatgcagacattgcattacttgcaaaagaaaaaggcacagaaagagtcattgcaagcgtaggatcaccggagcatgaagcagctctgaaggagcagggaatcagcatcttttctattctgctgtcgacaaaaacgctgcttcgcgcactgattgaagcgcctggcgtcatgaagctgctcacgaaccaagagtcttcgctgtatcaaattaatatggagaacagtaaatatgatggtgtcattttacgggaattccctttaacaggtgacgtcatctttgtcaggatcttcagaggtgtggacagcatcgttcctcatggggatacaaggctgaaacttggagaccgtttaattgtcaccggatctcgggggtacgtaacggatcttaagaaaacattggaaggataaatcttgaccaaataaggattcgtgttaatatagaggtgcagaacaattcaatatgtattcgtttaaccactaggggtgtccttcataagggctgagataaaagtgtgacttttagaccctcataacttgaacaggttcagacctgcgtagggaagtggagcggtatttgtgttattttactatgccaattccaaaccacttttccttgcgggaaagtggtttttttattttcagagggggaatgatttgtgaagttttcagaagaatgccgcagtgcagccgcagaatggtgggaggggagctttgtccatccgttcgttcaaggaatcggtgacggaactcttccgattgaccgttttaaatactacgtacttcaggattcctattatttaacgcattttgcaaaggtgcagtcatttggcgccgcttatgcgaaggatctttatacaacggggcggatggcaagtcatgcccaaggtacatatgaggcggaaatggcgcttcatcgcgagtttgccgagctgttggaaatcagcgaggaagagcgtaaggcgtttaagccgtctcctacggcgtactcttatacatcccatatgtaccgttcggttttgagcgggaatttcgcagaaatcttagcggccttgctgccatgctattggctctattacgaggttggtgagaaattgctgcattgtgatccggggcatccaatttatcagaagtggattggcacatatggcggtgattggtttagacaacaggtcgaggagcaaatcaaccgctttgatgagctggcggaaaacagcacggaggaagtgcgtgccaagatgaaagagaattttgtcatctccagctactatgaatatcaattttggggaatggcctatcgaaaagaaggctggtctgacagcggcataaaagaggtggaggaatgtggagcttcacgccataacggatgacagcaagccggtagaagagctagcgagaatcatcattacgattcagaatgaagttgattttattcatattcgggaacgttcaaaatcggcggcagatattttgaaactgctcgagcttatttttgaaggcggtatagataaacgaaaactggtgatgaacgggcgcgtggatattgcgcttttctctactattcaccgcgtgcagctgccaagcggcagcttttcaccgaagcaggtcagggccagatttccacaccttcatatcgggaggtcggtgcattcactggaggaagcggttcaagcagaaaaggaagacgcggactacgtgctgttcggccatgtgtttgaaacggattgcaaaaagggtcttgaaggcagaggagtatctttgctgtcagatatcaaacagcggatttccatcccggttatagccatcggggggatgacgccggacaggttaagcgacgtaaaacaagcaggggcagacggcatcgctgttatgtcaggaattttctcttccgctgagcccttggaagcagccagacgatattcccgcaagctaaaggagatgcgctatgaaaaggcattatgaagcagtggtgattggaggcggaattatcggttccgcgattgcttattatttggcaaaggaaaacaaaagcaccgcattgtttgaaagcggaacaatgggcggcagaacgacaagtgccgctgccggaatgctgggcgcccatgccgaatgcgaggaacgtgacgcgttttttgatttcgccatgcacagccagcgtctgtacaaaggtcttggagaagagctttatgcattatccggtgtggatatcaggcagcataacggcggtatgtttaagcttgcattttctgaagaagatgtgctgcagctgagacagatggacgatttggactctgtcagctggtattcaaaagaagaggtgttagaaaaagagccgtatgcgtctggtgacatctttggtgcatcttttattcaggatgatgtgcatgtggagccttattttgtttgcaaggcatatgtgaaagcagcaaaaatgcttggggcggagatttttgagcatacgcccgtcctgcatgtcgaacgtgacggtgaagccctgttcatcaagacccctagcgaagacgtatgggctaatcatgttgtcgttgccagcggggtgtggagcgggatgttttttaaacagctcggactgaacaatgcttttctccctgtaaaaggggagtgcctgtccgtttggaatgatgatatcccgctgacaaaaacgctttaccatgatcactgctatatcgtaccgagaaaaagcggcaaactggttgtcggcgcgacaatgaagccgggggactggagtgaaacaccggatcttggcggattggaatcggttatgaaaaaagcaaaaacgatgctgccggctatacagaatatgaaggtggatcgtttttgggcgggactccggccgggaacaaaggatggaaaaccgtacatcggcagacatcctgaggacagccgtattttatttgcggcgggccatttcagaaacgggatcctgcttgctcccgcaacgggcgctttgatcagtgatctcatcatgaataaagaggtcaaccaagactggctgcacgcattccgaattgatcgcaaggaggcggttcagatatgatgctacagctgaacggtaaagacgtgaagtgggaaaaagacacaggtacaattcaagacctgctggcgtcttatcagcttgaaaataaaattgttatcgtggaaagaaataaagaaataatcgggaaagaacgctatcacgaggttgagctttgtgatcgtgatgtcattgaaattgtccattttgtaggaggcggatgagcatgttaacaattggcggaaaatcatttcaatcaagattgctgctgggcacggggaaatacccatcgtttgacattcaaaaggaagcagtagctgtttccgagtctgatattttaacctttgctgtgcggagaatgaacatctttgaagcatctcagccgaattttctggaacagcttgatttatccaaatatacgcttttgccgaatacagcgggcgccagcagtgctgaagaagcggttcggattgcaaggctggcaaaagcgtcaggcctttgtgacatgattaaagttgaagtcatcggatgcagccgttccttgctgcctgaccctgttgagacattaaaagcgtctgaacagcttcttgaagaaggctttattgtgctcccgtacacgtcggatgacgttgtgctggcgagaaagctggaagagctcggcgttcatgccatcatgccgggtgcatctccgattggatcgggacaaggaatcttaaatcctttgaatctgtcatttattattgaacaggcgaaagtgccggtcatcgtggatgcgggaatcggctcgcctaaagatgcggcatacgcaatggagcttggagcggatggcgtactgctcaatacggctgtatcgggcgctgacgatcctgtgaaaatggctcgtgccatgaagctcgcggtggaagcaggacgcctttcttatgaggcgggccgaatcccgcttaagcaatacggaacggcaagcagtccgggagaaggtcttcctgtatgacaggcaggtattcaaggcaggagctgtttgctccgatcggcccatccggccagaaaaaattgaaagaagcgcgcgccgtgattatcggcgccggcgcgctcggaacagccagtgcagaaatgctggtgagagcgggagtcggctctgtgaaaattgccgacagagattatgttgaatggagcaacctccagcgccagcagctttatacagaagatgatgtcaaaaaagaaatgccgaaagcagccgctgcggagcgccgtctccgttcgattaacagcgatgttgatgtgaccggccttgtcatggatgtgacagcagaaaatatcttcgagctgattagggatgcatcaattatagtggatgcggctgataattttgaaacccgcctgatcgtaaatgatgctgcggtaaaggaagggattccttttctttacggtgcctgtgtagggagctacggcctcacctttaccgtggtgccgggttctactccttgcctgcattgcttactcgatgcacttccgattggcggagcaacatgtgacacagccggcatcatcagtccggctgttttgcaggtagcagtctttcaggtaacagatgcactgaagctgctgacgggagaggagtgcgagccggtgctgcgctcctttgatttgtggaaaaatgagcggtcagaagtgagagcggccagtctcaaacatgacgcatgcccaagctgcggcacaaaggattttccgtttttgtcatatgaaaatcaaacaaaagcggctgtattgtgcggcaggaacacggtgcagatcagatcatctattacgaaagaagcggatcttgaagcgcttgccggtcagctgaggcaggccgggcttgaagtagctgcgaacccgtatttaatttcctgccgctcggatgatatgaaaatggtgctgttccgggacggcagagctttgatccatggaacaaatgatattgcccgggcaaaatccatttatcataaatggatcgggtaataaaaggagtgtagtgtaatgagtatatataaagcattgacaatcgccggatcagattcaggcggcggcgcagggatacaggctgatattaaaacctttcaagagcttgaggtattcggaatgtctgcgattacagcggtaaccgctcaaaatacgcttggcgttcatggggtgcatccgctgactgtagaggcgttgagacagcaaattgacgctgttgctgaggatttgagaccggatgcagtcaaaacgggaatgctctggaatgccgacatgattgaagaagtggcaagaaaaattgacgagtacggattcaatcgtgtaattgttgatccggttatgatcgcaaagggcggggcatccttgctgcgtgatgagtcagttgccaccttaaaggagttgctcattccaagaagctacgcgattacgccgaatgtcccggaagcagaaacgctgacaggaatgacaatcagctcgctggatgaccggaaaaaagcagcggagcagctcgtcaagatgggtgcgcagcatgtcattatcaaaggcgggcaccagcctgaggacaatcacattactgaccttctttttgatggcagcatgtttatgcaaatcacccatccttatatcaatacgaagcatacgcatggcacaggctgcacctttgctgcagctttaacggcccaaacggctaaaggagacagcatccatcaggcatttgaagttgcggccaactttgtccgtgaagcggtggaaaatacgctcggcatcggatcgggacacgggccgacaaaccatttcgcttttaaacgaaacagcttaaatacaagccgatgagatcaccagctgatggtgatctcttttgcgtttgctacggtatgcgcttttcatctggacaaggttatgatatgataggaattaagatcaggtactaatactatgtctttattaaatataggaggctttatacatatgaatttttcacttgaaggccgcaacattgttgtgatgggggtagccaataaacgcagcatcgcctggggcattgcgcgttctttacatgaagcgggtgcacgtttgattttcacatacgctggtgaacgcctggagaaatccgttcacgagcttgctggaacattagaccgcaacgattccatcatcctcccttgcgatgttacaaacgacgcagaaatcgaaacttgcttcgcaagcattaaggagcaggtcggtgtaatccacggtatcgcgcattgtatcgcgtttgccaacaaggaagagcttgtcggcgaatacttaaacacaaatcgtgacggcttccttttggctcataacatcagctcatattctctgactgctgttgtcaaagcggcacgtccgatgatgactgaaggcggaagcattgtcactttgacgtaccttggcggagagcttgtgatgccaaactacaacgttatgggtgtagcaaaagcttctcttgatgcaagtgtgaaatatttagctgctgacttaggaaaagaaaatatccgcgtcaacagcatttctgccggcccgatcagaacattatctgctaaaggcatcagcgatttcaactctatcttaaaagacatcgaagagcgtgcaccgcttcgccgcacgacaacacctgaagaagtgggcgatacagctgcgttcttgttcagcgatatgtcccgcgggattacaggtgaaaatcttcacgttgattcaggtttccatatcactgcccgctaagcaggatctatttcaagcaatcccgaatagggattgcttttttatttcttctgattttcagctttctgtcatatagatagaatatgacacaatcggagggatgaagatgtctaataagaaaagaaacgcggataaaaaaccgctcatgtatattgttcagccggattatgcagaaactacaagatcatccatgcaggagattgtcatcaaaagaaaggccgacaaacccgctccgccaaaagctgaggaaaagccggtttaccatgagaagcagcaggaggaagctgtggcacaggatgtcctgcaagaagaccaaaagcctgcagccgaaccagtgagtcagcaaactcaagaggtgagagaaccagagaacataaaaagccaagaggaacagaaagcagagccgcaggccgtagaagaaaccgttgaacacgagcccccgaaagcagaaaaaaaggaagagcctgcacttgaggcccggaagcctgagaaagaaccggaagctgtccatagtgctgataaagcggaggaaaaagcaccgccggcacgaaaagtgaaaaaaccgatgagcaagatgacgatccacgaaaaaattgattttttaacaaagctgcctcataacatgccgagagcgctttgtttgattgaagccaatggaagaacgtacaggggcgtgattgtcggaagaagaaatgattccgtcctgcttcgaacaaccggaaacggagccccaaccgaactggcaatcgatgatattacctctttgcacccgctcggtttttaacgaaaaagaaaaaagctgcccggctgatgttgccggacagcttttttacatagagaaaagcctgcggcttgcaagcttttccagcttatgattaatgctgatgatgtgtacgattgattaatcgaggatttaagcagttgattgcgcagaagcagtctaagtcaacttcaatacagtagttcgttttttcgagtcggaacacttcacacaccgtatctttatcggtgaagtccaaaatgtgtttgtgttcgtcaaatgcgattaataatgacagtgttgcgcagcttccatgcactctttcgaccctgaaaaatactgtattaaagcaagggccgttatcgagttcgccgacatttccgaaggcgactaatggcgttgattttgatgtaaatattgcaaaaggcactgtgtcgcctaacgaatggcttacagataaaagcttagagtggcagccggtcgggcagtcttcttcaacagcgttttgcagatcttcaatattttctacagcttcacgcacgcagcttgatgttttctggctcatattatccctcctgccttataaatttgagactggcgaaatgatggagagtcagctgcctcacgcaggaagcagctgaatgatttgcacctgtaatagagtttggaaggggattcctctttacaagtgtttatccattgtgatgatgctttttatctttatgaggcgatgttctgtcaactagctctggtgacaggcactgaatcgcgcagaagcatccgagatccacttcaatgcagaaatctgttttttctagcccgaagaaatccgggtcgcaaggatggcaaacacttaaggtatcgcctttaacatcgacagggcgtaaaatagacagtgttgcgcagcaatcacataatttttcaacgcggaagaaaatggattcaaagcattgcatatcatccacaaatccccccacgtttccgaatgtggagaacaatccgccttttttatcaaacaagagaaacggaattgtgtctttacctgcaattgtcggattcaaaaggtttgtatagcagccagtcggacactgttcctcaactgcctcctgctctgctaaaatcttttccactgcatcgcatacacagttctcatgccggccatgggtttttccgcagctcattgatttcagctccttctttatagggtatttgactttagtccttaacaacatatgtacccgtgccccacttggtgtgggtgaacgtctatatattcatcatatgcttggaaaataagaaaaagcagagcgtttttagctctgcttttaggttctagaggacaagagtgatgactaggacagcgatcagaacgtttgtagctgtagagacaagggttgcgatatcggcatctactgttgtgacgtttacgccgcgggagcattcgataagaagtttctggcggtttacttgcttgttagctgtaagctgcaataaatcttgtgcgactaattcagcaataacgccatctgcaatggaggtgagagctactgtcaagacagctgcattaagcgctgttacaatagatgttacggcttgaacgtctgtagatgaaacgttgatgtcacaagagtctctaataataatcgtctcatctgagacttgtttgttgagatttgcctgagctagatcttggtcgataaaggcgttgttgtcattgccaaacccattgttattgcagcaaatatcgcaattgcattttctttcttctttttctttctctttgtgctctaacggatggtcacagtcaggatcaagtgcaacccaagagtatggtctgctttccatatctattcctccttttcttttactgttattaaatgagcgagcctcttactttgactgaggcatttatcttgatgatgtgccctattttttatgattaatttgaattgttattgttttgccgtctttgtctgagctgttcaatgagctgctctctgcggctaagcggtttatcgctcttttgctcttgtacggcttcttcttcttttttcttcttgtgtttttcagctagctccgctgatttcgcttgcaggtcttttaccatattcaaaagcatttctttttcttcatctgatacttttttcattttgtcttttgtgatgccgtgttttacaaatatgttttggaccagcattttcatcattggatcaacttctgggagcttttcaagctcttctttgattttatcgttatctgacatttgttctcacctcaacttttagtttgtgaaaagaaagggttaaaggatgtcgaattcaagtagcatactgtttaacacctgaagcaagatttgtacaaaggttattatttcgtctgcagacaaagtaatcttgatgtttcggctgttgataattttaatgatggttctttttttgatttgagagttatcgagaatgagtatttcgcttgctactgtgtcggccaagtcctcgtcggcaataacgagctgtgtcagcaggataatcaatgttgtaaccaaggcttgtatagaaagggcagatgttatatgtgacgtatctattgtgatattttcgcaatcaatcacttcgatctgctgctcgaattcgcttgataattgctcaaatatgtcaggatgcagggattcaatttttgtttcaaatgacataaccttcactcctttcttatccatactctatataatgcaaatggggtgcagagcggaataataaaaataaccaattttctgccggacaagatacaattcatgaagaatagggttttcgcatatatgtgaagggatcatgattggcaaaggagtgaacgagtggttataaatgggctgacaattgttcttctatcgcttgcggtctttcggctcgcccgcctgctggtgtttgacacgattatggcgccgcttcgcagtctgtttcatgaagagaaggaagaaaaggatgcggacgggaatattcaaacctatatcgtgattaaaggaaccggtgtcagggcgtttattggtgaattgctgagctgctattggtgcacaggcgtgtggtgcgccggctttttgattttatgccaggcgttgatcccgcaagcggcgcagtggctgattttacttttggcgatcgccggccttgccggcatcatagaaacgctcgtatcaaaatggctgcaagaatgaggcgttaccaccagcaacttttcactagcatcagcataaagtagcatatatgacataaggaaaggaagggaacaaaatgaatcaattcaataaaccttcccaaaaatctccatatacagattcgtcgtatcaatcaaaaaagataaaaaagaaaggctgcgggtgcggaaataaaaagaaaaagcctcaatagcctggcaaagaaaccggagaactccggttttttgttttttaacggagcggcctcgctcagcatatatcataagcggggggataaaagtgaatgagtttgaaaaatggatagaaggaagatatgaaccacacgaacaaaagcaaaaagagtatgaagacacgatgggccgtatcagaaaagacttggatgcatttgataaagccggtctggaatttgaagatgagattgaagagctggctgaaaaaacggaggccttacttaaaaaacatcaagctcaatatgatcaatcgtaaatccgcaaacgccctatgcgaatatccaagccgatccaatcagctcacatagtgtatagagagtaaaggaggtgcttatctatgggctttggatacggattcggcggcggctacggcggcggctgttatggcggttatgctggcggttacggcggcggctatggttcaacatttgttttgttggtcgtattattcattctcctcatcatcgtaggtgcatctttcttttaagatgtattgaggaagtacgggttataacccgtgcttccttgccttgtgtttatttttaaaaatgttggaaaagcacattgtattatgtgcattcatacaataccgtattactccgccaaaaggaggcgcattatggataatcaattttttaagaacatcgaaaagaaaacaggtgtgaagatgcaggatgtaatgaatcttgccggatcactccaaaacgctaattttaaagatgaaaatacagtgcgcagtgtgattaaccgcgtagctcagatggcaaacagacgcgtgccaaaagaattagaagataaaattgtggaatctattacaagcggaaaagaaaagcttgattttggcacgatttctaaaatgatggataataaataagtggatggcctggctgactcactgcagcgggcctttttttacagtaaaaacccggcagtaatctgccggactgttaatgatgcaagggctgtcttgctttttgtagaaggggatacaaaaatcttgagcggttggctgttttgccgcgcctgttagcggggcaagacaaatataaatgctgtttcgcccgggtcatggctacatataaaagacgtctttcctcctcaagagcggcctcgtctccttttcttgccgtttctaatgagaaatcgtgcggaatcgagccgtctacagtgcctaacacgtagactgttttgaattcaaggccttttgaccggtgaatggtcatcagctgaacgccatgttcatccgttctgtttttctcagcggccctcatatggtctacgtgggcaagaaagtcaggaatcgttttgaacttcttggcgacaaccttgatgtcgcgcaggtcatcggaacctttttccagcttgttgccctcattgccccgcttttttaaatactcggagaagcccatttttccttctgcaaaggtgatggcttctacgggcttcatcgtgcggaggcttgcaaaaaacggtacgattttcttgattttgtccagctggaatggcttcagatcaggcaatttggccagcgctttgatcatggtacagtcctctgtaatcgagagcgccttcagcgtattcaaagcggactgttttaaaaacaaggcgggaagcaagtgtttaatcgcctcggtgtcatcctcattttggctggcatacaagtaggcgagaatctggcggacgatccgtctgctgtaaaacgattggacgccgcggtcagctgtatacggaattgatgattgatgaagcctttcataaatagcacggcctccgctgtttgtgcggtacagaaccgcaaagtcttctggactggctccattttgaattttttctttgatatcggaaacgaccattgtggcttcttcctcttcatcataaggataaaacagcacagggacctgaatgtcatcgcgggccgcttcaagcgttttggcatatctgtttttgttctttttcacaacgatatcagcactagagacgatcgggtgcgtagacctgtagttcgcagttaaatagatcgtcttcgctcccggataatccttttgaaaatcaagaatgaaagacggattgcttccgcgaaacgcgtagatggactggtcatcgtctccgacacagcacaggttttgctccggactggcgagcatttgcatgattttgtattgaaccggattaatgtcctgaaactcatcaattaagatatacgtaaaccgagattgatattgttccagaaggtcaggccgctcgataaacaattcatagcaggctgaagccatgtcatcaaaatcaaattggctgtgttcttttttctggcgttcataatgttcatataaacgataaacttgtttttcccactcatcttttagagggatgcgttcatttgggacataagtgtttttccaaaaaccgatctgctgcagagcttggtcaactgggaattctttctcatcgatgccttcttcatagagtgcttttttgatatattgttcccgctgccactccattttcagcagatgctcaccgttccatttagcagaattagagtgatacaagatcttataaaacagactgtggaatgttcctgtcacaagtcttctgacttttgccggctgtaatccgtactggttggccatacgctctttcatttcagcgacagcttttgttgtaaaggtgacaagcagcatattttcaggcggtatgcctaagtgttcgatcatgtgggcggcacgggctgtcagcacccgtgtttttccgctccccgcacctgcaagcacgagcagcgggccctctgtttccgtgacagctttcagctgatccgtgtttaaaccgacagacggaaaaaggctcgtatcgggttctattgtttttggcacaaatggtgttcctggtttaatgcttctaggacggtgccattccgtaacagctggggacgggtcagcggcgatcgcttttcccttgggtaaacgaatgacaccagattcctgatcgtcttcttttttttcctctttagagggcttcggttcgcacgcctcctcacatgccggaaaatcgcctggctggcgatggataaactctggcggatcggcgatgttaagccgtaacaaaacgggctttccgcaatgagaacaaaataaatgtccttttattccctcttcaaagaggaattgataatgttctctcgaatatgtatgtaaatgtatgattctatcattcagtcgggcgcatttcaaaaaggggtcctcccaatcaaaaggtgttcattacagacaatgactatcatatcaaaagaaatgtgtttcaaaaagtaagtttaagggaaaagagacagcagaggggtgggtattgtatgatatatgcaggtcaaattcagaaccagcaatacgctcaatatgctaatagaacgattggacataagcaggattatgccggaaccgaaaaaatcagctatgtcccgtttcagcgggtatacaaagaactggaaaagcagcaggagaatcaaacggcagctgaaagaaaagtaaacgagatgaaacgtaagcgctctctttataagagattgcgagaaaaaggaatgggcacatatattaatcgatatgtataaaaaaccgttcataccagagaacggtttttttatatgcagtaaaaatccggatctcaaaagatccggatgcgttcagtccttcatcatttgtaagtgcggaatgccggcatcgaggaattctttttcagaaagcacgcgatacccgtgtttcttgtaaaacggcacagcctgtgtttgcgcgtttaaaatgaaaccggaagcgcctccgtctgccgcggctttttcgagcgctttcataatgatgccgccgacaccggctgagcggtggcttttcagtacgcaaatccgctctaacttgccgtagccgtccttcatgcgccatcttccggcaccgacaggcttttcaccgtcatacacgatgatatgctctgactcattttcaagttcgtcaatttcttcttcagcaggcacgttttgttctttgacaaagacttcttctcttacatagaatgcatctttcagttgttcttcattttttgcgataactgctttcaaacattattctcctctgcctagcaagaaggtttcatatactgtccacgatccgttttccagctggtaaagcaagtggaaacggtcaacgatttcttcatgcgacacttcctgcatttttaattgtcccagcacatctgaatgctcatcgtcggagagattttggccgaccgtcacatgcggaacgaaattatattcctgttctcctgccaacacaccggtgtatagcttttcattgagtgtttttaactcttccgtcggttctgctttgatgtaaatgacattattgacaggcgcaaatgagctgtattttgtcattttgagaacgagtgggtgggactcttttgcgatgtttcttaaatgtgatacgagctgatccgctttctcctccgcgcattcaaaggatgctctcagcgtcaaatgaggcgggattagagagtagcttgggtcatagcgctttctgtaagagtttgcaaggtcttggagcttttttgatggaaataaaacgattccgtatttcatattatgtccctcctggaaataaagtatgatagagtgttaaagcatttttttcagcgccggggtgatgagcggctgccagtatgtccatttgtggtctccgtcaaatggctcgaaatcataatcggaaagctttttctccagcagctgtttcagctcccggttcggttctgtaaagtccagaatgttcccgtctgtcgtgtggacgtcagtttcttttgttccgatttggtgataaatagagaggtgtttgatatcgtctgactgttttacggcttctagtacgtgtttgtcaacatagggagactgcatgatgatgttgccaaacatattcggataatcaagcgctgtcataagtgacacggttgctccgagcgaatcacctatcagcgttcggccgtaaccgatctgataggttggatactcatcatctgcaaaaggaacgagctcatgggcgatgaaccgtttataagccgaaaattttgaaccctccggatgataggtgtttctgcgctcttttacatccttataaggaacaccgataataatgctccggtctatttcgcgtttcgacagcaattcctcaacctgtctgccgattctccccagcctgaaataatcgtggccgtcctgcgcgataatgacatggtatttataaagcggggagtagttggacggcagataaacaagcaaggtcatttcctcgttaagctcttttgaaaagaatttcttttcttgcactgtgccgtttttcggtgccataaaaacattcctccaggacatcactatactttcttgcattttcaattattgtaccatgaattattagaaatttctctctttaaacggttcggcacacgaagaaaaaagtgttgaaataaactgtgaattgcgctaatataaaacaatcagaaaattgaaatcgatatttcttatcgtgagaggtggagggactggcccttagaaacctcagcaaccggcttgttttgcatgtgcaaagcgccaaggtgctaaatccagcaagcgttttttatgcttggaagataagaagaagcgttaaaccccttcttcttatgaagaaggggtttttattttgaaaagggaaggtgtcagctatatgtcacagcacgttgaaacgaaattagcccaaattgggaaccgtagcgatgaagtcacgggaacagtgagtgctcctatctatttatcaacagcataccgccacagagggatcggagaatctaccggatttgattatgtccgcacaaaaaatccgacacgccagcttgttgaggacgccatcgctaacttagaaaacggcgcgagagggcttgcctttagttcgggaatggctgctatccaaacgattatggcgctgtttaaaagcggagatgaactgatcgtttcatcggacctatatggcggcacgtaccgtttatttgaaaatgaatggaaaaaatacggattgacttttcattatgatgatttcagcgatgaggactgtttacgctctaagattacgccgaatacaaaagcggtgtttgtggaaacgccgacaaaccccctcatgcaggaggcggacattgaacatattgcccggatgacaaaggagcacggtcttctgctgatcgtagataatacattttatacaccggtcttgcagcggccgcttgagctgggagctgacattgtcattcacagcgcaaccaagtatttaggcgggcataacgatctgcttgctggacttgtcgtggtgaaggatgagcggctcggagaggaaatgtttcagcatcaaaatgcgatcggcgccgtcctgccgccatttgattcgtggcttctgatgagaggaatgaagacgctgagcctcagaatgcgtcagcatcaggcaaacgcgcaggagcttgcggcgtttttagaagagcaggaagaaatttcggatgtgctgtatcccggaaaaggcggcatgctgtccttccgtctgcaaaaagaagaatgggttaatccgtttttaaaagcactgaagaccatttgttttgcagaaagcctcggcggggtggaaagctttattacataccctgcgacccagacgcacatggatattcctgaagagatccgcatcgcaaacggggtgtgcaatcggttgctgcgcttttctgtcggtattgaacatgcggaagatttaaaagaggatctaaaacaggcattatgtcaggtcaaagagggagctgtttcatttgagtaaacacaattggacgctggaaacccagctcgtgcacaatccatttaaaacagacggcggaaccggggcggtcagtgtaccgattcagcacgcctcgacttttcaccaatcttcatttgaagagttcggggcatatgattacagccgctctggcacgccgacaagaacagctctcgaagaaacaattgccgcattggaaggcggaacaagaggatttgctttcagttcaggcatggctgctatctcaacagcatttttactgctgtcacagggtgatcacgttcttgtgacagaagatgtatacggcggaaccttccgtatggtgacagaggtgctgacccggtttggcattgagcatacgtttgtcgacatgacggatcgtaatgaagtggcgcggagcatcaagccgaacacaaaggtcatttatatggagacgccatcaaatccgacacttgggattacggatattaaagcagttgttcagcttgcaaaagaaaacggctgcctgacctttctggacaatacattcatgacaccggcactgcaacgtccgcttgatctcggcgtggatattgtacttcacagcgcgacaaaattcttaagcggacacagcgatgtactctcaggtttagctgctgtcaaggatgaagagcttgggaagcagctgtataagctgcaaaacgcgttcggcgccgtccttggcgtgcaagattgctggctcgtgctgcgcggcttaaaaacgttgcaggtccgtttagagaaagcgagccaaacagcgcagcggcttgcggaatttttccagaagcatccggcggtgaagcgcgtgtattatccgggactggctgatcatcccggcgctgaaacccataaaagccagtcaacgggagcgggcgccgtactatcttttgagcttgaaagcaaagaggccgttaagaagttagtcgagaatgtgtcacttccagtcttcgctgtcagccttggcgccgtggaatcgattttgtcctatccggcaacgatgtctcacgcggcaatgcctaaggaagagcgtgaaaaacgcggtatcactgatggcctgctccgtctgagtgtgggcgtcgaacatgcagacgatttagaacacgatttcgaacaagcgctgaaagaaattgctccagttgcggttcgttaaaaaagaagccggggatggcccggcttcttttattattgttcgtcatcaggattcagaatcgcgaggacttgatgatcctcccaaacgccattaatttttacattttttcgggcgatgccttctttatgaaatcccgctttttctaaaacacgcatggacccgagattacggggcatcacaccggcttcaatccgatgcagtttcaattcgtggaacgcataatcaacaaccaatctgactgcctctgtcataatgccctttccattatgggctttgtctaaaaaatacccgatgaacgcagtttgcagcgcgccacggatgatttgaaagagcgaaaccgtcccgattaatctatcgtctgacgctgtaaagatgccaaaatgatattcttcatctttctcaagtctttcctgatactcggttattcgttttctttgcccctcaaccgtatagtaatcgtctgcgcgtatcatagaaaactgttcgaaaaaatcccgattttcgctttgcagccgcaaattttcttcggcatccgttacttctaaaggtctaacataaatggtttttccttttaacatacagtgatctctccgttctcatgtcagcattcctcttacattattctcagggaaatgcaaatatcctttttataagaaggaagaaaaccaatttcccataaaagtgccaacatagttgccgattaagtagccgagcgtaccgacaagcatgatcggggcaacaagctcccgccatcccttggcaattgccatcgcagccgcagtcgtcggtcccccgacagtagcgttgacggcgagcagaatttcttcaagctgcacacggaacaattttccggcagctaaggaaaccgctaaattgctgatcgcaatgataaacacgaataatagaataagaggcgcattcgtgacgattaaacggagatctgcaggaatgccgatcaccacaaaaaacaaataaatcaaaaaggttccaagttcctgagatccattgagcctttcaaaaaaacgtgggaaaagaaaaatgataagaacagttaaagacgtaagcaccaggtactgatcaccaagcgtaccggtcagcaggggatgagaaaaaatgcttttaaaataaccagaaaccttcatacttaccgcaacaagtgcgaaagcagcaccggcattaaaagctatatcctttaaggaaatatccttccgtttccaatagctttcagcactgtttccgctgtttccatcggcttttaccttctcttcaaacggcatggcataatgccgctgaaaccatttgagtgcaggaatgctgattaaaataaaaaacaaaagcgccatcataaaattatcagccacaacggtagccgacacatattcaccaggcgtctcaaattttgccgccatcgccgcaaagttgaccccgccgccgatataagaggcgctgatcatcccgccgattttatcgagatagggaatatgctgtttaagtagaaaaaaagcaagaatgctcccaagcacagtgccagcggagctaatcagaaaaataaacagcaaacgcctgctttccttaaaaatttgccgaacattgatctgaaacaataaaagtggtatcgccagcggcaccacataagaccacacagtatcatacacaggcgactcaacaggaagcactcctacatttgtaaacaccatagcacctgccagcgcgataatagcacccgacacagcggacgcccacttaaagcgctgctccagcccgatgctcactgccgcccacaccgcaataaacccccacaatacccatacatcatcagaagaaatcaaagaatgcaaaatcccatcacccctattgttagaaaattaagacatattataatagccggggaacggaacagcaagtccaaaaaaagtttttctaaaaaagcagttgacgaatagaagggaaggttatataatagaacttgtcagaaagacaataacatacccagcaacacatacatatcatgattccgtagctcagctgggagagcgctaccttgacagggtagaggtcgctggttcgagcccagtcggaatcatagcttaaacccttgcgcagcaagggttttttattttgcttatttattgattttgtctcattcatcgaattggggacgaaattatttttttgagctgattttgacgaagaatctcaaaatcaactctgtttttgtgctaggtttctaggatcgaactggttaaagtgttttactgtgctattttcgagtttctcggtaacgtggccataaatatcactagttgttcgagcactggcatgtccagctcttctttggatagcaactgagactttcgccagcttccataaggagagccaccatagtatgccgcaagtcatgaagacgaacatcttttaggccgtacttcttttttaattttagtccattttgcggtaggggttgtatagtagtaaggttttcctttaccactgtgaaatacaaattgatgttctccgccttcccaggcatcgccaagcaacaatttttccacttgttgcctaaaaagacaatcaaacgcttaagtaattatatcttcaatatccaattatctattctatcgcctctttccatattaaaatcaactctaaaaactcatcagtttctataatactttcaaaaggctcatcaacccggtaatgatgttcagctattgtcttgtttttcttaattattatacttgtagcattcaacgtaatttcaaagtcttcataatctcctgttaaaaccttcttaacgtatccaatatactcgtctgcttcctcttttgttgaaatatcctcaaaaacgtccgagaaaatagttaatttttccggtagtattattcttgtgataccaaatggatctttttttaattgatatgtatatctcatcttgtttatcaccttctatgttatttattatacaaaggataagcagtggctattgtaccatccttgtttaagaacatttctattttaattcctgttgaattttcacctataaacttattagcacctatcttttttttattttgatacgcttcatcaatagcctttaacacatctacacgattccattcctttggaaaaaaactagatttggctatttttctcttcccgcttatttcaacattggcttcataaacaccatttttatcaggtgttttctcggaaccaggtataatttttccacccatcatactttcatgatgatatccaactgctttaccgcgtctattaatttcaccatggtaaatgtgtttcatcgttcccgtattatatttacccgtatccttattgttagaacgttcagatcttctgagaacactctcttttttattttcaatcatactttttaggagaggagtattttttgcgttatacgtattctcgatgtcttgtgcaatcccaaccagtgcaagatcattcttatttctaataatagaattgatgtaagatttgcctttgtttattcctttattgacatgagcagcggctgttccaccttcaaccactttacctactttagaaagcttggtagtggtttgcaccgcggcacccgcaccttttggaccaacgatatttccgatcacataactgatataatgacctttttcatatgcatcaccatttaccattttatcattccatgaatcggcgaggtttgtccagatgatttttgaataagaaggtacgctcaaaatggttgtaattgtttttgtcagtttcagttcgatagggagctgtgaatattcccatgcgcccacagctaagtctttgatgccatatatggtatcgtcaatcacatcgtcaataccatcatcaactccctcaacgaaatcaattactgtcttgctggcattgattatacttttaccgacggccttcagctgttttgcttgttcaagctgcactgcgtattggagctgttcaggggtaagattctcatagccgaccttcttggcaatgtctaagtattcatctggatccgtcactccgtcagctagcttctttttcagctctttgatttctcgttctttcgcttcatctttcttgatcttcaaataagcttcagtctgtttctcgatatcgccttttttcttatgtatgtcactttcacggtacgccttggcgttgtagtgaatgggcgtagcgtttttcccttttcctgtggattcctcaagcttttgaaagtccttcttgatgaattgctcgtttggctctgattgggcatattcagtaacaagtgcttcgtccacgctgcctagtttatcgactgtttttttgcgtttgtcctctgcatctgcaagttcgtctttaaagtcttctgtcgagaacaaatcaagtgggaggatgtcatcgatatcatgtaagatatctttcaacgctttcttttgttcagacattatggattttgattttgtgtaggcgttagccagttcgtgttctaagaaggattcttctatatatgcatcagacaagctggcgtcctctaaagtgcctgaaatgcttgttaagaaagcaattttcatatcaagtaagtcaatccaattgtcagctacacctgcgtggtcttgataaaatgctttaatgttgtcggcgcctttgccggaaaactcactgtcatctaaatcagctacagctttaaaggctttctttagattgaccatctgacttcttaattctttgtattcctttgcacgtttatctgcttctgaaagcagtgatttggcttcaaatactttcatgttcatatcctttcgtttgaatagctccaacaagattttaccatgggaaaatgaagaaatagacagcgatgtgattcaaaagtgtgaaatgaataatttgatctgtgtcaatttacctatttggattatttgtttggaaactgatgacgcagtaagacgattccagctgatgaatggtttaaatcctgatggcatttatggtcctaagactaaagctaaactcgaatctcttcttaaataaaaatagccctcctcaattggagggctatttttatttaatagaaacgtgatgtgtgtaccagtttccggttgcagtgaatcgtaattccatatggccgtggcggttacctccatactttacaaacgtgtaatcagaattggcgattgcatccttagccgttttatcaatgtttgcaattttcttggaagtgattttaccattccagccagcaaaacctgaagcggatgcacttggcgggctttcccactttgttattttctttccatactcgtatgaatagttgtcacttactcgaatatcatataattttatccctgtaaactttacagcgtaatagccacttgcagttttattttgggtggcctgtgtttttatcttttccattcccatatctgtacttacgcccatttccacagtgaaaccattaccgagatcaatttcttgatatggatgatctttgctgacatgcatactgtttaaagccttattcacttcttttacagttgggattttctcagatgaaagggttctcaagtttttttgttttgttatctcgtgaaaggtcgccttatcaataatcagatcagaattcttgtccactttttcaacagcatctgcactttgaagactaaacagagatgaaaaactcaaagctagggcaaaaaccacacccacaagtaactttttcattttatccctccttaatgttttcgtccccatcttatcttaatgtataatattggtaaatgagacgaaagtaacaaatgatgctattgattaaagtattaggctttgaaggaacgggaagatcgaaaagtaaatgaatggttttacccatttaaacaaccatatatcaggtgtatattggattgtaggggagggatatcatggtcaagatcatattggcatttgtttatctatttggcttcgttgtgttgagcaattgggctttcgacggaatattttcagagagctatttctcgccaatcggtttcctttggtctatcttatttacatttttcataggggtttataccggcttgcctttaatctacaaaaagtttactcaatcaagccgtttgactttgaaaagtaaaaagccaatttatttcactatcggtacagctgttattctctttgggctttattttctcaaaaacgaaatcgccccctatttgatgctatgtggctattttttaactctggcatcaggtatagccctgaccatcttattacagcccaaaaccaacaactgtaaaacagtataactaacaagaactaatgaaagcccgtctcaaggcgggctctatatcaaaagaaagggaatttttttgtgatatctatttacaatggtcaatagatattgtataattaaggtatagaaaggaggtgctgaagtggacgaggtaagaaactggattcttgctatcgctggtatcgtgaccatcattaaacacatctacgacatatggcagaaggaaagcgaaaagcatagcaagaaaaagaaaaagcgctcccgccgggtaagcaagaagcgctgatacacagtgagcaaaggggagtaaatccccttgctcataccattatatcacgtccacgataatatgaaaaaatattttaagcagtacaacacagcagattttgccgttttgcttatattggttgccgggatcgtcgcaattgatttgaccgatgagggtatgtctggaaagattgcgcatactgtattgatgatagccgttgttattaccttgttaaaaggattcattatgatgtggagagaaagccgacatgaaagaaagcgaaaaaattaagtttatccaggaagaagttttgactgcagcggaagcgggggagttgcttggaatcactcggcagcgattaagcacccttgtgacttcaggaaagctcaaaccggttaaaaaggttgggacagttgcattgtttttgcttggacatgtacaagcccttaaaaaagaattagaagcaggccggaagaagtaccggccgtatgatgagtgaatcccttctcaagatgagaatgattacttgtcctacttttgccacttaataatgagtggtaaattttatcaatttttgatatcctgtaattaatcataattgcgggggttcattatgaatgtatctgaattagttatttttccagatttattaaagttaccaaaaagcgatttggaggacatttgcaccaacgaaggtattgcggaatctggaggggcttttgaactagcgaaaagaatatgggattatgctgatacgtcagaaaaaaaaacaaagaatgtttacaccgtattgtcacaaattttttgctggtaatacgtcaatttcttggtacacttgtgatagccttgaagatttaagtaaatatattattgaaaaagaaaggcacaatccatttgaaacaaaaattccgtatgaagaggcaaagctaaatacgactccaaagttaagaagtgcatctagaataaacgagcattcatattttttaaggtttatatataaagatggtactcgtaggattataggtgaagatatagaggttttaccgacaaataaaacggctacagcttttatagatgaactaaacggaattatagaagttagagctaaaccaaatgatgctgaaaaaatagcagaggtaattgctgggtatgcaaggcagcaactgtctttacacaagcaaaactttattaaacctttcgggggtagtatagaaagtatagcggataccctaggtggtaaactttacgagtccaaagcaagtcctgagttatggatggacaactttggggaagaagaaaatgaagcattgcttgatatttttgaagctttaagtaaatactttgagaacggagatatagataaacttcaagaatgtttagataatgctaaagagattttgggtggggagctacttagtttaccttttgctgtacttgtacttgctggtatggggaatgtaggtttaaaagttgaacaaaaagatttaaggaacactactttatacaaagtatttaaaccctacttacaaacctcgggtggatatattaaatttgaagttgaggaaaatggtgttcagcacgagttttcaatggttgttggagttgaaagccagagcatctattttcgctctaaaaagactacagaaactgtaataaaaaaggtaagagaaaaacttttattgcaaaaattagttgtgtaaatatttgaaagagggtgatcttatgggtataaattggaaacaaaaatcagaaattgacgaagtgattaaagaaatcgcttgttcaagagtaattagattttatccaacatatattagtaagatcactttaattaatttagatactgtttttgaatatttattggagttggtagatgacggatctctaaatatattgtgggaaataagatgtcctgactttgattgtaactctgtaattttgcgaacacataatttatcagaaataatgggtaaagaaatagaatgtgattattgtgaaaatggtctattagtcagaagacaacatgtattccctgtttttgaaataaatgatgactttagagaatttttaaaacaaagtaaaaaaaaacaagtgaattatctacacgctctataagttcaccaattctccaagaaaaagcattaatttctttagaagacattaatttattactagaagaccgaactaaaaaagaattgaatgaaaaatctggagtgaatatatataattttttatacgttgagggtgattatgtggagaagaaacaatctttgggtagcgtaaaaattggcggaaatgtagggaattttgcaatccaaaatgaaaacacaacacaaactaatggtaataatgaagtaagcagagcatttgatgaaatttttgaacgaataaagggaatcgagaacgatgttcaaagggaacaggccatttttaatgctgaaatattaaggaatgcagttgaagagaacgatgtagataaaggaaaaagagtattagaatttttaagaaattcaattgggacaattggatcgttaacgaccattgctaagttctttggtattactatataaataaggcccaaaagggctttttttatattatccactttttctgttgcttcttcaattcacctttcatcaaaaggctttttacagctatacgaatatcctcttcactctttcctgttttccttttcaaatcgtccagagttggattctttccatacaaatgcatattcactatgatctgatatactttccgttcaaaatcagtcatttgatcatctcctagaaggatgataatcgaacgtatgttcccttgtaaataagttggatttggggacagatggggacgaattggggaccaacttgttcatttttagtcaaaacagaagattttttatcagaaatacttgtcagaaaaccccataaaataagatttcgaaataaaacatccgttcgtgtcagaacataatcactaccttgacagggtagaggtcgctggttcgagcccagtcggaatcatagcttaaacccttgcgcagcaagggttttttattttgcgttaataaagccggttcgtcaaattcgtgagttgttggcgaactgttggcgaaattcattgaccgcagtccaaaaactacctccaaacttacttgattagttcaatagtaacaaacggaagatcggatttctgttaaatcttcattgagaatagccagtccaagaccgtcacttcagccatgcatcttttaaatgaaattttgtactgaaaacatcaattgtatttttaaattctgctctagaatcagcccctttataataatcttgataaattgcttggggtgatactgattcgtgatttgtgctatggtttgcaaggcttgtagcaaaagcaggagcaacagaaacgagtaaagcaagggataatgcagaaccagttaaagctgttttcaatttcattttaagcacttccttttttaaaatacaactttattattaaatggaatacaaaaatatccaaggtgttttttgttagtaagttgagttagggggattggatggcacttagaatattgtttctgctgatgggatgttgattctggatatatttccaacacgattacaggccggacatgaaagcgaaccttgctttgatcggggcaatcatttcatttaaagctgcggtttactttaaagatattgatgtattgagagaagaggaaaacaaatgaacggaatttctgagcgttggaacgcgtttaaattacaaaaatcccctgaaccactctagatcaggggattgctttcccaacagcttattaagtagcggaaggcatgatcaacgatttagtatcaatttattaattgcgaatactagaaacataccgttttccgccttccttagaagtaacatattcccgaggaacgttaagtctattggtagaatgataacttacataaagtttcatatttgctcggctcgttacgatagccgtatgatccatccaaccatcagcatagcgaagacctattttattatggtaatcatagtgatatacatctccaagctttacatttgaatatgtatcagaaacagtcttcatttttattccgccagcttttaaaatgtatgatctaaaggctcctgcattaacccaagcatctgtatagggtttccattctttaaagtacggcattcttccagctcttaatgcttgggaaacaaagttagtacaatctttgtctttataatatttatagtttttatttggttttaaggcatatttttctgcatatttcattgcagcgtaaccactatatcctttaacagatgttgcagtcacagttagttgattagagttagcagcattgaagttcatacttactggtttatcttcacttttcacttcttctttatcatcatttttcacttcttgcttataattttttaaaaattcatctaatttaacatccgaagaatattcttcatcattttcatattgtagagttgaagaagaattatttaattgtgttacatttagttgcttagaagaattactcaatggtattacatttagttgattagaagaatttttaacttgagagaaacttagattagaagtatttgttgattgagaactttgtttattagaagttgttttgggaatttcaagtttaatattatcgcccagagatgttgttactttttcaacaccaaaaacaaagtttcgagtaatataagcttcaacaattagcttattgtttttttcagaagtcttaacatcgtctatatcgtatgtaaactcgtggaatttttgtttgtccactttacttaacgcagaatacagtaagactccttcgtcggaatcagtcaatttagactctttaggatgcgctaaaggagtgttgtgttcaaaatcatatttctgttgttctaacatatccttaactttttcgtaaccaatctcgttggtaattgaaacattttctttagtctctttattagtagtggctgcaaaaacttcatttgttgacactaatggtgacaatgatagacataaaactagtgaagaaagtaattcttttttcatacgaaacctccaataaaatctaaatataagtaatatttatcatttacaccaattgaaatatggcataaaatacatgtaataatataacataaaaataaatacataaaaaggtatcggaggaaaaaatgaaaaagaaaactaaaattatactttctctcttgacagcacttattgttatattgatagtacttccagttctatctcctgttgtctttacagcttcttcggaaaaaggagcaatcagacacgaaatttataaaagaggatatccctaccaaagctactttgcagttctccagaaaagagaaggagacaatgaatctgggaatctttattatgtaaattggctagattggaaagatgaaacagggcaaactcctcacttatgctattcgaaaaaagcatcagatggtgaatacgaagtaagttgtggcacagggccgtaaaaataaattttaaaattgaataagtccaagacggaaagcctgcagacactgatcgttttacagagaaatttgtgcttcgatcggtgtccgtttttttttcgcaactaaccatatgtctatcgcgattactagctatgaaaggagtaattagacatgaaacagtccaaaaagaaaccatcatagaagcaacatgagcgcttagatcgtttctggcaacaaatgatgaacactaacatgcaaacactcagacgtggcaaaggcggcgcaccacagaagaatcaaaacgctgtgactcacggctttttctctaaattcctgccagaagaaacgcttgagatcatggaagagattcaggagcgttcgcctgctgatatgatatgggatcagatacagattcagtatgcagctattatccgggcgcaaaagatcatgttcgtttctgataaggaagaaatgatcaaagagctgaaaaagaaaaggtccctcatatctgaggtcagcgaaattgaagatgggcttgtcatttgttttagtacgtggtttcgctacagactttacagtgaaactataccaaacatatttcacaaacttgataaaataacttttaaaccttcctataaaatgaaggttttttatttgatttcaatttttaaatcctttacatacagcgattgattaactcgagcaatcaatgtcgcagttatatttatttttcaagaaaatgttataatgaaaagccataaaatgataggagggggaatttcgatgcattacataacggcatgtttaaaaatcatcagtgataaagaccttaatgagataatgaaggaattcaaaaaacttgaggaagaaacgaacaaagaagagggttgtattacattccatgcttatccgcttgagccatcagaacgtaaaataatgctttgggagatttgggaaaacgaagaagctgtgaaaacccatttcacgaaaaaacacacaatagacgttcaaaaacaagaattaacggaagtagaatggttaatgaaaagcaatgtgaatgattgaaaggctctttaaaaaaaagacattcaatgacttagaatcagccacttgtgattaagtagtaaattgttgtccaactcttatttttttctatttaatattttttgagacgaaaatgttttttaaagctgattttaaaatgtattcaaagtcagctctgtttgatttaatggattatattctttggataacttgttaccatcataatggagatactccgtataaattggaggttaaaataatgagtcattctcaagaaaaaattgcactaattacaggagcaagcagtcaaggggatattggtacggctatttgtcgtaagttagcctcacagggtatacatatcttctttactcactggaattctgatgcggcctggatagaagaatttcaacaagaaattttacgtatgggtgtccgctgtgaggcaatgaaaattgatttatcagatgcacatgctgcattcacaatacatgaaaaaatttcagataaattaggatatccttccatccttattaataatgcagctcattccgcaagtgataattatgtatcgttagatgctaaatcacttgatgagcattatgcggttaatatgagatcgaattttcttctttgtgttgaattcgcccgtcggtttaaaaaatctaatttaatatcaggaagaatcatcaatatgacatcagggcaggatttaggtcctttgcctggagagttagcgtatgcagcaactaaaggagctatttctgcatttactaggtcgttatcacaagaacttgcaccattgggcatcactgttaacgccgtaaacccaggtccaacagattctacatggatgacagatgaaataagaaattttctttcacctaaatttccaatggggcgtattggcacaccagatgatgcagcacgaatgattgcttttcttgcaagtgatgaggctgaatggataactggacaaattattcattcagaaggtggatttattcggggctaagctactgaaacacaatatacaccaatgtatgatgtattcccaaaactaaatctaaacttgaagcgaaaataaggtcccttctctttttagagggggaccttattttattcatgcatgttttgcatccagaaaatctggcggataaagattaataaaccgttacatatacttttccgaatactgcagtacctttaaacaaagtaatcgtggcttttccttttgatttagccgtcactaaaccattttgatcgacttcagcaactttttggttatcagtccaataacgagtagctgaattatttttaacagaataggtttctccaacttttagaggtaaatcatagtcttgaattttgataacatgtgtaggtgaaatagaaatgttctttacctcagtaggtgtggagtttatttcatgagctgaagctaccccgctgaccgacagagctaacgcagaaatcgataaagcagaaacaacagtttttttgaaattcattttgaaacactcctttaaagttttttgtcttgcactataacaattcaataaaagtaattattttccttgtaaataaatgttaataatatgtgaacgatcaatttatttgagctaagaatattgtgtgccctgcacagagtttgtatttatgatggaaaattgctgagagagaatggccatccttaaaatgttaatagcacacatttgatgggtactagtttgttgagcgtgtgggaattttgttacctgcactttatccccgaagataccaaatcatttttcttcatcatgttcttactttcgtactcatacattagaaaatcttcgttctaaataggtgaagaacattggagtatttttatgaatttctgctgaataacgataaaaaatacattacatagcaaactcaaagaatataaaaatcgcttttttccggatgtttcggtaaaaaacgaaacttttgtctctatgattttattttataatgtaaacggtttcttatatagtatacttatactatcaatttgctcaagtagatactgacaggaaggatagaaaaacagatggaatacataaatacaagacaaaaagagattttgtatctgttgttatctgaacctgatgactatttagttgtgcaagatttcgcagatagggtacagtgttctgaaaaaacaatccggaatgatttgaaagtgattgaggattatctcaatgagcattctcatgcacagcttattcgaaaaccagggttgggcgtttatttacatatagaagaacaggaaaggacctggctaagccaacaattacatactgaacatttttcttctaggcagcggagcgatgaagaaagaatgctgcacattgcttatgacttattaatgaatccgaagcctgtttccgcaaaagacattgccgctcggcattttgtcaatcgatcttccattaaaaaggatttatacgcagtagaagagtggctgaagcgttttgatctcacactggtttctaggcagcggcttggattaaaggttgaagggaacgaaagaaataaaagaaaggcattggcaagaatatctgatttgatccacaatacagcgtttaccagccaatttattaaaagtaagtttttacattatgaagtagactttgtgacgaaagaaatcaaatcattgcaaaaaaagcattccctctatttcacagacgaaacgtttgaaagtttgctgctgcatacattgttaatggtccgccgcatcaaaatgaagcagccgatttcattgtccccaaaagaaatggcggcagtaaaaaagaagaaagaatatcaatggacatttgcttgtttacaacggctcgaaccggtttttgcaatccgctttcctgaagaagaagccgtgtacttaacattacatatattgggcggtaaagttcgttatccattgcaaacagaagagaaccttgaaaatgctgtgcttcctaaggttgtagggcatttaatcaatcgtgtttcagagctgaaaatgatggattttcataaggatcaggatttgatcaatggtttgaacattcatctcaatactgtgctacaacggctgagctacgatctttctgtagcaaatcctatgctcaatgacatcaaaaagatgtacccttatttgttccaccttatcattgatgttttggaagatatcaatcaaacttttgatcttcttattcctgaggaagaggcagcatatttgacattgcattttcaggcagcgatcgaacggatgcagggcagcagcgagacacataaaaaggcgattatcgtctgccacatggggattgggatgtcacaattgctgcggacaaaaattgaacggaaatatcaccaaatcgctgtaatggcttgtattgcaaaggccgatttaaaggattatatcaaaaagcatgaggatattgatcttgtcatatccaccattgcgctggagaatataacggttccccatattgttgtgtctccgcttttagagcctggcgaagagaagaaattaagtgcgtttatatgtcagctgggcgaatcacaccgccaaaaacaaaaaacgtttcagatgctgaacaatacgactccttttttggtttttttgcagcaggaggcagagcaccgctacaagttaatcgaacagctggcgacagctttgtttgagaaaggctatgttgataaggactatgcggttcatgcggtgatgagggaaaaaatgtcggcgacaaatattgggtcaggcattgccattcctcatgcaaacgctaaatttattaaacaatcagcaatcgcgattgccacattaaaggagccgcttgaatggggaaatgaaaaagtttcgctcgtttttatgctggctgtcaaacacgaggatcaaaccatgacaaagcagctgtttagcgagctttcatatcttagcgagcagccggccttcgtccagaagctgacgaaagaagccaatgtcatgacatttttatctcatttggattattaaaagcagggattattccttgcttttttttgttatagggaaaaatgcctttattaccggaacctatggtaaaaaaaagcgattttaatgagctgatttcggtatacagttgagacaagatcttataattcacactttaaaggagggttcctatgaaactgttagcgattacatcttgtccgaatggaatcgcccatacatatatggcagcggaaaatctgcaaaaagctgctgacagactgggcgttagcatcaaagttgagacccagggagggattggtgtcgaaaataagctaaccgaagaggaaattcgcgaagcggaagcaatcattattgctgcagaccgttcggtaaacaaagaccggtttataggcaaaaaactgctgtctgtgggggtacaggacggtatccgcaaaccggaagaattgattcaaaaagctcttaacggggatataccggtctatcgttccgctacaaaatcggaatccggtaatcatcaggagaagaaacaaaatccaatttaccgtcatttaatgaacggcgtttcatttatggttcctttcattgttgtcggcggattattgatagcggttgcattaacgcttggaggggagaaaacacctaaaggcttagttattccggatgattccttctggaaaacgattgaacagatcggcagtgcttcattttcatttatgattccgattttagccggctatatcgcctatagcatcgctgataaaccggggcttgtgccaggtatgatcggcggttatattgcggcgactggaagtttttatgacagcgcaagcggcgccggattcctcggggggattattgccgggtttttggccggatacgctgcactttggatcaaaaaattaaaagttccaaaagccatccagccgattatgccgattattattattccggtgtttgcatcactgattgtaggtttagcgtttgtatttttgataggcgcgcctgtagctcaaattttcgcctctttaacagtttggctggcggggatgaaagggtcgagctcgatccttctggcattgattttaggggcgatgatctcatttgatatgggcggtcctgtaaataaggtggcgtttctgtttggatcggcaatgattggagaaggaaattatgaaattatgggaccaattgctgtcgccatttgtatccccccgattggtcttggcattgcgacgtttttaggaaaaagaaaattcgaggcatctcaaagagaaatggggaaagcggcatttacgatgggtctcttcggcattactgaaggagcgattccatttgcggcgcaggaccctctgcgcgttattccaagtattatggcaggctcaatgacaggttctgtgatagccatgattggcaatgtgggagacagagtggcgcacggcggacctatcgttgcagtgcttggcgcagttgatcatgtcttgatgttttttattgctgtgattgcagggtctcttgtcactgctctgttcgtcaatgtactaaaaaaggatattacggcgtctcctgtgctcagtgaaactgcaccgacctccgcgccaagtgaagctgcggcagcaaatgaaataaagcagccaattcaaagccaaaaagctgagatgtcggaatttaaaaaactgacagacattatcagcccggaattaattgaaccaaatttatctggggaaacgagggatgacatcatagatgaattgattcagaaattgtcccgaagaggtgcgctgctttcagagagcgggtttaaacaagccattttgaatcgtgaacaacagggaacaacggcgattggcatgaatatcgcgattccgcacggaaagtctgaggcggtcagggagccgagtgttgcctttgggatcaaacgatcaggcgttgattggaatagcctggatggatcagaagctaaattaatctttatgattgctgtaccgaaagagagcgggggaaaccagcatctcaaaatactgcagatgctatctcgaaagctaatggatgacaattatagggagcggctgctctccgtgcaaacaacagaagaagcatacaagctgctagaagaaatcgaataaagcgggggattttcatgacgactgaaccgttatttttcaagcctgttttcaaagaaagaatttggggcgggaccgctttagctgattttggctataccattccgtcacaacgaacaggggagtgctgggcttttgccgcgcatcaaaatggtcaaagcgttgttcaaaacggaatgtataaggggttcacgctcagcgaattatgggaacatcacagacatttattcggacagcttgaaggggaccgtttccctctgcttacaaaaatattagatgctgaccaggacttatctgttcaggtgcatccgaatgatgaatatgccaacatacatgaaaacggtgagcttggaaaaacagaatgctggtacattattgattgccaaaaagatgccgagattatttatggccacaatgcaacaacaaaggaagaactaactaccatgatagagcgtggagaatgggatgagctcttgcgccgtgtaaaggtaaagccgggggattttttctatgtgccaagcggtactgttcatgcgattggaaaaggaattcttgctttggagacgcagcagaactcagacacaacctacagattatatgattatgaccgaaaagatgcagaaggcaagctgcgcgagcttcatctgaaaaagagcatcgaagtgatagaggtcccgtctattccagaacggcatacagttcaccatgaacaaattgaggatttgcttacaacgacattggttgaatgcgcttacttttcggtggggaaatggaacttatcaggatcagcaagcttaaagcagcaaaaaccattccttcttatcagtgtgattgaaggggagggccgtatgatctctggtgagtatgtctatcctttcaaaaaaggagatcatatgttgctgccttacggtcttggagaatttaaactcgaaggatatgcagaatgtatcgtctcccatctgtaacatagcagggcttgagaaataaatttgcgagtgaagacgcctattctgcagcaatgatctaaataaaataagagtttaatagttggagaagaaatgttacactcttttctgtatatggtaaagaatgaaaaaacacgattcggttggtagtccggatgcatgattgagaatgtcagtaaccttcccctcctcgggatgtccatcattctttaatatcttttatgaggagggaatcgttatgaaattaacgatttactacgatgatcagttttgggtaggcgttgttgaagttgtggacaatggaaagctaagagcctttcggcatctttttggcaaagagccgagggattctgaagtattagagtttgttcataaccaactcctgaatatgttggcccaagctgagcaggaaggagttcgtttacaaggcagacgtcaaaaaaagatcaatccaaaaagattgcagcgccaggtttcaaaagagttgaaaaacgccggagtagcttctaaagctcaagaggcgataaagctagagcttgaagcaagaaagcaaaagaaaaaacaaataatgaaagaacaacgagaacatgtaaaagagcaaaggtatatgctcaaaaagcaaaaagcgaaaaagaagcacagaggtaaataatccaaacaaaagcaggcgcagtgcctgcttttgtaattaaggactctactttgtaacatatatccaatgtttatactccgctgatttatgattcaatataaaccctaacttctccaaggttttttgtgagcctagattatcatgttcgcatcttgcggtgatccgggatactgtttctcggcttaatgcccagtttattagtttttgggcggcttccacacaataacctttgcggcgatgacttttatttgttgcaaaaccgatttcaatcatgccattttcgtctgggtcacctaaaaatccagttcctccaacaatttcatgactgtccttctttacaataatccatgaatcaaatccttttgttccattgtttttgactaaaatctcgcggaaataaggtatcgcttcaaaaaaatcagaatttggccattcaccatttgtttcataacctaagtctttgatagcctgatgatcttgtttagacgcggcgtcaagaaggggaatatcaatcgtttttaatcgtaatcgattcgtttcaaggagaaccatatatctaatcctcttttctttttactgggaataatgataacatataacaattttctctgataccttggcagtagagaaagatggaaaaattgagggggattgaaagagtgacaggggagagtttgcccagaccaaaaacgggtaggaaaatgctgatgttaatgtgtccctacccgtttttctgttcctgaatgcagggtttctgataacatgttgtgctaccttttcgcaatcaaataaagcgatatggctctttgggtttgaacaggattatgaatgataatgacccattggtttcttcgtcttggaaagcttgctaccgcatacaatggagcagtatcgcgcggagtgaacccaccatttatcacgttgatatctcttccttcaagatgacaaactaagtattcacctggattgatgacctgttggttcgtccatgcgtaagaataaaagccgtctccaagatcttcggtggaagatggggggacaaagccatctacagtcaatgtgatttctcttcttcgctgtctttctgaaaaatctggacttctttgagggttatgagtatgtgaaaagtaaggaattaacgcagggccataaaagtaatgatacaaagcaaccactcctttattttccattcatacaaattgtatgtgggagttatttgttcattcctgttttgttccatgtagactaataatgggctataggcgtccaaggaaatcaatttgtcctttcgttgattcaatgctagtaaccttgaaaatgcaggttaggatgatagaatttacttattactgcaagaagttagatatacatcattttgatagtgggtgaaaacaatggcgaaaaaaatggcaaaaacaaatgcggttcgtctgatagaacagcagaacatctcttatgaggtattagggtataaaacagacggccagccggtagatggcatctctgttgcggaaaaaatcggttatcctttgaaatatgtatataaaacgttggttgcagcaacaggaacaaatcattattatgtctttgttgtacccgttgcagaagagttagatgtaaaaaaggcagcaaaggtgacaggggaaaagaaaatagaaatgattgcaatgaaggagctgttagcggtaactggctatcttcgcggcggctgctcgccaattggcatgaaaaaattgttcccgacctatattgatgcatctgcagaaatgcttgattttattattgtcagtgcagggaaaatcggtatgcagctaaagttggcgccacaagatttagccagatcatgtgatgccgcatttgcagaaattgtatagatgcagatataggggaacgaaaaagcttagtcatatcgactaagctttttccgcatccctttcaaatatgatttcaaaataagcagctgccccatacccatctatactgggagcgaaaatctgaacgaatctccagcctcttttcgcataatcatggatgatttgctggtagtcttctttaggccttcttctcatcgtactcagctcaactcttacgaattcatattctttcatcgtttgatccctcctattaaggtatacgtaaaatggagcgagaagttccgaaaagcctcactaaacacagaaacatcttgaagagttaaggggctataaaaacgaatttcaccgggtcagcagtccaaatgaatctcttgcttattgcatttgactgagtatataagtaaaaaaagagcggtcagaacatataagaaggagatgatcattaacgcactcataacagggtagtgtttagcggagtagatgaaaaaatcaagctgtgaaatttgtttggggctgctgacggcatcaattccatttagcagttttgagagtttagcagtatagttccaatcaaatcgatctgaaacaagctcgcttccttgataccaattaacagcagctaaaaacagaaataccataatagaaaatccaagctgaacaactaaaaatattcccttcacttttgtatgacctccaaatctatgaatatgggaaaatcaaacaatatattaccaccgtatgggttattcttgcaatttcactttcatacaactcaaacgcaagtctatttttttgtttgtttttggcttataatacctgatgatggaaaaagagtgcgggtttatagattagagaaacaaatgtatttcttagcattttttatttgtggagagagtatagaagcattcgattagatctgctttttcacagaaacgcttttcatctgtttgcctgagctttacaattctggcaaaaaaacaatgatttctttcaatcaaaacatgcaacgatgcgacatattttatatcttgatgacttatctcattgcctttaagtcattctatcgagaaagtgatggtattttatgaacaaagaaaccctaaaaaacatactcatgattttttcaatatgcgcaaccctccgagaaaccgatggtatgcgcatagctgatagctggattttgagtgagattatacgatttttgatttgcatggctgtgttttttgccatgacatttctattagatgctgtttttccaaacaaaaaagagtcacattaatgtgtggctctttttgcatcatctgatcagaaacatcataaatgaatcgatcatcatgatgaagaacagcaagcaaaaataaataagcgagtagacaaacatatcctttgcccacttcacgtcatcgtctgttttgaatcctttgatgctttttttgatccatatgcctccgagaaccaaggcggctaagaaataaaatgggcttatatggccggtgcctagagagaaaggaaataatagcgtgaccggcaccaggacggcaatatattgcatcatttttatttttgttacatgattgcctttgactactggcaagagcggaacgccagcagcgcgatattcctctttgcgtcttatcccaatcgcccaaaaatgcggcggctgccacagaaacataatcgtgtacaacagcactgctgtcatactgaagtcaccggttacggcacaataccccatcaatggcggcgcagctcctgggaagctcccgacaaatgtgctccacacagacgttcgtttcacccataccgtatagatgatcgcataaaaaataaaggcggccagtccgagataggccgttaatggattgagggaataaagcatggcaaggcctgcgatccctaaaacagagccatatgttaagatcatggctggcggcattttccctgtgaccgaggccctgctgcgagtgcgtgccatttttgcgtccatatgccgatcaaaatagttgttatagacagtgccggaagccatcacaaacgcggttcccaacattgctgttaccattgtcatcaaaaaagccaagccggttaacgttttttctgcgcttgcaaacgcgatccaaaacccgccgaaggctgctatcgagtttgatatgataatgcccggctttgcaagtttgataaaatcgtaaatggttacccggttcgaagcttttatgtattttgtttcagatatggctgcagaatctcttgtattctccaaaaatagacgcctcccccaaaactgcatgcttttgttatcgtaacaagagggggacagaatcacaattatttcctatatttgtcatgatattgtcatttttaaaacaaaaaaatggggagctggactgcccccattttgatatgcggcgactagtaaccgtaacctccgccatatcctccgccataaccgccgccgtaaccgtgccaagggtagtaaggcggtcgcgggcgcgggtagtaataaggcgggcgcggataaaacgggtagaacggataatacggtcttggataataataaggcggataaaatggcggtctcggacgcggataataataaggctgtctttcatcataaggggtaatttgttcaaatgactgttcattcaaagggtaatccaagaggaaaacctccctagctttttttattccttttaccatattcctgatgcttaagttgggtgtatgtacattcatgaaattcggttttttttatgatgaaattccttaaaaaggattgacatgaacttctaaatctcatagtattacaaatgtgaaataaatgttactacaatgttacaaaaacatttctaaatagatacagttccaactgatgaagagtaaatcgaaatggctacgaaagaaggagtttttgttgttggcaaaaagaatcaaatggtttcatgtattaatagcagttgtatgtgtggtgggccttatcggctttttccataatcattcattgaaaaaagaaacggtcatgaataaagtaagaactgattctcaatatgggaatgttgagatcgcaacgcttgtgaatgacgggaaaacttttaattacgcggttaactatcccgttttcaaaaatgaaaaaatggattcggcattaaaaagattcgcagaaaaagaggttcgtcaatttcaaaaggaaacaaaagacgttgaccaagagcatacgacaaaacgcaacgaattaaatgttgattataaaattgtccattatgccaaacagacagtggcgattgtatttaatgaatataaatacatcggcggggcacacgggcaaaccgtgaaaaaaacgtttaactatgattttagtaaacaagcgtttctttccattgatgatattttcaaagaggacgctgactacttacataagctttcgttaatcgcttatcacgagctgaaaaagaataaggacattgccgcggacgatgcactgttaaaggaagggacggctccgaaaaaagaaaatttcagccgctttgccatcaaggaggattatatcgaactttactttgacacatatcaggttgcagcaggctatcttggagagcaatcgattgccattaagaaaagtcttttgaaagacattctgaaagaacaatatattgataaagcaaaaaataaaaataaaatcaaagaacaaaagccgaagcatgaagtgatttctttacccaaagaggaaacggttgatccaaatcaaaaagtcattgcgcttactttcgacgacggcccgaatcctgcgacaacaaatcagattctagactccttgaagaaatataagggtcatgccacgttttttgttttggggagcagggttcaatattatccggaaacgctaataagaatgctgaaagaaggaaatgaggtggggaaccattcatggagccatccgcttctcacaaggctttcagtgaaagaagcgttaaagcagatcaatgatacgcaagacatcattgaaaaaataagcggataccgtccgacgcttgtaagacccccatacggcggcattaatgatgaactgcggagtcaaatgaaaatggatgttgcgttatgggatgttgacccggaagattggaaagaccgtaacaaaaaaacaattgttgaccgtgtcatgaatcaggcgggagatggaagaaccattttgattcacgatatttaccgcacctctgctgatgcggccgatgaaattatgaaaaagctcaccgatcaaggctatcaattggtgacagtttctcagcttgaagaggttaaaaaacaaagagaagcgaaataaattaaaaaaggctgtccgtacggacagccttttttctatttaataagagcctgtggtggcccaaacatttaagtttggtcctgaatacttgccaaaagcgtaagaagtccttggatctaaatcatataccatcggtgtatagcaagacttttggccggccaccgcttttccattgccgcctgcagaatcacaattatatctctttccgtccgtgtttcgggtaatctccgcatttgcttcaaagccagacgtcaatgtattattcatcgtgatttttgcccaagccgttttacatgtactgctgaatttaagctcgactactccgatgacttgattgctggcattcactaagtttgaggatttttttgtagagccgctggacgcacaatcattgtaataagggctttttccatcgtaggcatgggtttccgcattggcgggtacacctttgacggcaaaaacaaatactactgcaaataacaccaatgaagccttcgtaaacagtcttttcatatcctttatgacctccttaatatggcaaacaataaatcatacggaggaacaatcaaaacatgcatgcttttttgtgaacaataaaggcggccgggaggatggagttcttggccgcctttgatgtgaggttaaacttttacatcaatggtttgtccgagagtcggatgctgaatcatctttaaggtttgatcggcattttgctgggcggtatccagcatttttttcgttaaagcgatattaacattctgggcaagggatgcttgatgcattgcaaccgataaagcaggaatatccatcgttccacctcctatgccttacctatcggcggctttgtatcattttacagtgaaaaatggcttaattttcgctgttgacccctacgctgcggcatatcgtatgtttttgacaaggagggaatcaggatgaatcttgtcatggaaaagacctttgagcaatacgaaaagctgttttcaatggaagaacagaaaagagaagatgaatttcggtatacgatgatgaggccgtttgaaaagatgtggaccgccatccatgttccgctgaaagcgaaggagccaaacggctatgatgtgatcatggctgcgaaaatgcttggctatttggatgtccgtgatgttgaaatcggacagaaagcactgcgaatactgaaagaatcacatgtttcagagactgcggaatctgcacttcggcaatgcatattttttgatgagcgcgaacagctgcgggtgaatgcaaaggagatcaaattcggcctttatatcgctgatccaaataagcttcagctgcaaaaaggctactgcgggtttggcgggataccgggctttattcatgtatggattgatccgaaccgttataacctgccaaggattccttccattattgctcatgagtttcatcataatttgcggttttcgtatatagattttcatcatggctctgtaagtgtcggggattatcttgtgattgaaggattggcggaatcattcgccagagagctgtttggtacggaacgattgggcccttgggtaactcgttttgatcatgaggatttgcaatattccattgatgtgattaatgaggtgttggatgtgaaaggattttcggaagtcagccgttatatgtttggtgatccaattgctaaagacaaaggatttgaacctgtaggtttatcggcttttgcgggttatgcagttggctatcatgccgttcagtcatttatgaatcaacatcatatcacgataagcgaggccacacgtttggatgcgaaggccattctttctcagtgcggattgttttccaaatgaaaaaaagcgtcacatacagcggcgctttttgattcccaaaaccagcagttctatggcggcacaggcggcaattccgattgtatatgcttcgatatcgctccataaaaaaccgtaccctagtacaagcccgccaagagaagtatctctaatctggtcgatccattcggcatgatagagctggctgaattcaatgacaaaacagaaagaaagactgataatgcccgttatcattgtcttcagcttccgaaatagaaatccgcatcccgtgaagatcatggcggcccacaacgagtctcccagataagtattgagggtatcaggaagaacactggagaatgctctggatccaagccccagcccaatgatcagtatggtgaaaactgcatatatccaacgatttcgcttcattgcgaattgataccccgtctctgcttcatctccctgtattgtaaggaatatagcttttatttgtccactaaaaaagcggctgaatagccgcgtagggtgtttattttgcttttaggtttacatggtcggctgtctgatccgtgcctattacaaaatggagttcatagcggcctgtatcatatacataatcgatttcatcggtaaacgggacggttaacacccgatttgctggtcctaattgcttctgcagcacttccggcgtaactccgcctaaattcagctgccgttccacaccggttccaaagtatcggatttctgaaattgtcatgtctttatgataggaaaatccgtagcccggctgtcccatattccagtgatataaatcaaatcgattgtctcccccgactggtctttccggttccccaaacgcagcgtggacatccccttttgtgcttttgttaatggtaaggccttgcgcctgctgaggcatttctcctttgtaggcggtgttgtaaaggtttttgacgagctcggaggctgattgggttgtattttcatagagtgtatttgtttgagctgcggcctttgccggtgctgaaaaggacgcagccccaaagccggtaaaacagcttgttactgctgctgccgcggttatagcagacattgtctttttcatgttaatccctcctaattgatctaccattccgtttccccgtgtttttgcaacgaaacatgtgagtgcgctttgtatgttttattgagttgttgtaagggaactgaaataggtaattcggtatataaagcaagaaaggggaatggagatgcctggcaagaaaaaaatcacaataaacggcgttgaaatggaagcgtccgaggaacagacggtgctgcagcttttgaataacagctcgattgaagtgccgcaagtttgctatcatccaagcttagggccgattgagacatgtgatacgtgcatcgtcagcatcaatggtgagctgaagaggtcgtgctccgctgaattaaaggatggggatatcattgatacgctctcacctgacgtgaaaaaagcgcaggtcatcgggatggacaagattttatataatcatgagctttattgtacagtttgcgattacaacaatgggggatgcgaaatacataatacggtgaaggaaatgaaaatcaatcaccaaagcattccgtttgatcacaagccataccataaggatgaatcccatccgttttatcggtatgatccagatcaatgtattttgtgcggacgctgtgttgaggcatgccaggacgttcaggtaactgaaacgctgaccattgactgggagcggaaacgcccgcgcgtcatttgggataacgacgtgccgatcaatgagtcgtcatgtgtgtcatgcggccattgttcaacggtctgtccgtgcaacgcgatgatggaaaaaggaatggaaggggaagccggatatttaacaggcatcaataacgaaacgctgcgaccgatgattgagatcacgaaaggcgtagagacaggctacggctcgattctcgccatttctgatatggaatcggccatgcgtgatgaacgaatcaaaaaaacgaaaaccgtctgcacgtattgcggcgtcggctgcagctttgatgtctggacaaagggcagagacattctgaaagtagagccgcaggaggaagcgccagccaacggcatttctacttgtgtgaaaggcaagttcggctgggatttcgtcaacagcgaagaacgcctgacaaagccgctgatccgggaaggcgatcatttccgtgaagcagagtgggaggaggtgttatcgctgatcgccagcaagttcactgaattaaaagaggcgtttggcccggattctctcgcttttattacatcttctaaatgtacaaatgaagaatcctatcttatgcaaaagctggccagaggggtcattggcacaaataatgtggacaactgctcccgctattgccaatctcctgcgactgccggcctgttccggacagtcggctatggcggtgattcaggatcaattacagatatcgcgcaagcggaccttgttttgattatcggttcgaacacgtctgagtcgcatccagtcttatccactcgcattaaacgggctcataagctgagagggcagaaagtgatcgtcgcggatatcagaaaacacgaaatggcagaacgctccgatttatttgtccagccgcgtgccggatcggatatcgtctggctgaatgcgatcgccaaatatttaatagaaaacggcaaggccgatgaacgatttttgagagaaagagtgaacggacggcatgaatatgtaaaaagcctcgcgccgtacacacttgaatatgctgaggagaaaaccgggattgatcaagaaacccttatccaaatggcagagatgatcgggcaagctgacagtgtgtgcgcattgtgggcgatgggcgtgacacagcatattggaggaagcgacacgagcacggcgatctctaatctgctgcttgtgacaggaaactacggaaaaccgggagcaggttcttacccattgcgcggccataacaacgtgcagggagcaagtgactttgggagtatgcctgacagactaccgggctatgaaaaagtgacggacgaacaagtccgccaaaaatacgagcgggcatggggcgtaccgctgccgaaggagccgggtatgaccaaccacgaaatgattgaaaaaatccattccggacagttgaaagcgatgtatgtaaaaggtgaagaaatgggccttgtcgactccaatatcaatcatgtacacgctgcatatgaaaagcttgatttctttgtggtgcaggacattttcctttcacgtacagcggagtttgctgatgtggttcttcctgcgagcccaagccttgaaaaagaaggaacgtttacaaacacagaacgccggattcagcgtttgtatcaggtatttgaaccgctgggtgaatcaaagccggattggcagattattatggaggttgccaataagcttggcgccgactggctctatgagcatcctgcagacattatggaggaagcagccaagctgtcgccgatttatgccggtgtcacctatgaacgtcttgagggctataattccctgcaatggcctgtaaacgctgatggaaaggattcgcctttactctttacagagcgcttccctttcccggacggcaaggccattctctaccctgtccagtggacagagcctaaggaattcggtgaggaatatgatatccatgtcaacaatgggcggctcttggagcacttccacgaagggaacctgacttacaaatcaaaagggatttcggagaaaacaccggaagtgttcttagaaatttctcctgagcttgcggcagaacgagggattcaggacggaaccctcgtcagactcacatcgcctttcggaaatgtcaaagtgaagtgcctgattactgatcgagtcaaagggaaggaagtatatctgccaatgaacgattcaggggaagcggcgatcaacctgttaacaggcagccatgccgataaggataccgatacgcctgcttacaaagaaacatcggccaagatggaaattttgaagcacgacggaatcagcccgctgcctaagatcaaccaccgcaacggcaatccgcagccgcaaatcggtgtgcaggttcataagaaatgggcgcggaaggattatattttccctggtgacgctgtgaaaagggggatgggccataatggctaaagcgattaaacgaatccaaaaaatcgaggtaacagaagaggatcagcgaaagcgtgatttgcgggaaattgaagatgctctaattgaccacaaagaagcgattctcgaaacattgcatatgctgggccatatgaacgagcgcggtgtcctgccgttgctccgcggcctttttggccaaggggataaagttcttgatatcctggtgaaaaaggcagatacagaggaaacagccaatacgctgaaaaatctgcttcttctgtttggaacactcggcatgctggacgtgaagcagctggagcctctcattttgaaagtgaatgcgggtgtggcaagcgctgtagagcagaaaaacagtgaagaaaagacaggttattttgatattatccgctcgctaaaagacccggaaatcaacaaatcaattacactgctcttttcctttttaaaaggaatgggacaagatacaaaggagctggaacgcacgacgcagcctccggaacaccaaaaacatcatcaggaacctcgagagaaaagaggaatgaataagcgagattgacctcccacccgagcggcttcagccagctcgggttttttgatgaaaaggtctaatggactagtaaaaaatattcaaatactaggaagaagtaagattgtgatgaatgagatagaaataatcgttactttcttacctgttaagaaaaggaaaaatctgattataatagaaatcgattactttagatgggggaacaatcatgaaaaaagtcttattactattatttgtcttgacgatcgggttagcgctttctgcgtgcagccaatcgagcgatgcgtcagagaaggaaaaaccgaaagagaaaaaatcgcaagaagagcttgaaaaggaacttgataaggaattgaaaaaaggcggtgagccgaagaccaaaaaagatgatcaaatacataaaataggagaaacatttaaagcaggacatacgaattttacagtgaataaagttgatagagtgcaaaaaggtgaatatatgaatgttggcggagctgtaaatgaggagacaaaaacaataaaagatgatgaggaacggcttattatagaagttacgatggaaaatataggggaagattcaataagctacaattttatcgggtttgatttaagagataagaatgatcaatcagtgcggcctgttttttctatagaagagaagggcagaatccttatgggaggaacactagtatcggggaaaaaggttacaggtgtactcagttatgtcatccctaaaggagaacagaaacattacacactggtatataatccgtttttagctgatacaaatagcagtaatacagaagagagagtaaaggacgatattgattacttggtgaagttagattagaagctaatttacagttgcacgtttttcatctgtggaaaacgtgcattttttatagcgaaacttgacttgaaaggatgagtgataaaagtgcaaaccaaatggctggaacgggcacagcgaattcgggcgatcgcacaggctgggcttgctttttccaaggatgtgtacgacagggagaggtacgaagagctaatgaagcttagcacggaaatgatggcggattactcggagaaggacattgaagttatcactgatttatggcaaggcgagaagggctatccgacaccgaaagcggatgttcgcggcgcagtattccgagagaatcagattttgcttgtccgggagaagcatgatgagctgtggtcgctgccgggtggattttgcgagattggtttatcgccagctgaaaacgtcgtcaaggagatcaaagaagagtcggggtacgatacagagccgtctcgattgctggccgtgctagacagccataaacactctcatccccctcagccttatcactattataaaatcttcatcgcatgcagcatgacgggcgggcagggggaaacaggggtcgagacgaatcatgccgctttttttccggaagacagactcccgccgctctctcctaaacgaaacacaccctcacagcttagcatgctgtttgactttttgcgccatccggacaagaaaacgatatttgactaaaaaagaaagagcctatgggctctttcttttttataatgtaatgtgtttttcgttggcgagtttcagaagggtcaaaatagaatcggcttgtttatggccgagtttttgctttaatttgttttcttcaactaatcggctgccataaattttgacagaggctttgtcgacgacagtatgccagttttcctgtttttttccctcaacaagcggtttttcatgtctctcagaaaaagagaacacaaacagtacgaatgcaagtgaaagtaggatgccgacaacttgttttttgtaatcagtctgtgctgccacgttgttctctccttcaccttttaccttctatttaatcatagaatcagcttattttacataatgggaaagtcatttttggagttagtgcatttggttgaaaacagaggcgttttttgagcggagcggtgcaattgaatctatattggctttgcgtgcttatgcctaaggtcacgttgtgaaccaaaacagcagtgcagaatagaaaaaaattgaaagattatggtaagatgaacgaaattcgagggggaatatatgatgcctgcatcaaacatcgtgatcgcctgcctgctgttatcaatttaattatttgtggtagtccctctctttttcgaaagcgggaggtgaagtggaacattaattgctgaattctttcaaggggagtgaccgtacatgaatgtgttaaaccgccggcaagccttgcagcgagcgctgctcaatgggaaaaacaaacaggatgcgtatcatccgtttccatggtacgaatcgatgagaaaggatgcgcctgtttcctttgatgaagaaaatcaagtgtggagcgtttttctttatgatgatgtcaaaaaagttgttggggataaagagctgttttccagttacatgccgcagcagacaagctctattggaaattccatcattaacatggacccgccgaagcatacaaaaatccgttcagtcgtgaataaagcctttactccgcgcgtgatgaagcaatgggaaccgagaattcaagaaatcacagatgaactgattcaaaaatgtcaggggcgcagtgagtttgaccttgttcacgatttttcatacccgcttccggttattgtgatatctgagctgctaggagtgccttcagcgcatatggatcagtttaaagcatggtctgatcttctggtcagtacaccgaaggataaaagtgaagaagctgaaaaagcctttttggaagaacgagataagtgtgaggaagaactggctgcgttttttgccggcatcatagaagaaaagcgaaacaaaccggcacaggatattatttctattttagtgaaagcggaagaaacaggcgagaagctgtccggtgaagagctgattccgttttgcacgctgctgctggtggccggaaatgaaaccactacaaacctgatttcaaatgcgatgtacagcatattagaaacgccaggcgtttacgaggaactgcgcagccatcctgaactgatgcctcaggcagtcgaggaagccttacgtttcagagcgcccgccccggttttgagacgcattgccaagcgggatacggaaatcggggggcacctgattaaagaaggtgatatggttttggcgtttgtggcatcggcaaatcgtgatgaagtgaagtttgacaggccgcacatgtttgatatccgccgccatcccaatccgcatattgcgtttggccatggcatccatttttgccttggggctccgcttgcccgtcttgaagcaaatatcgcgttaacgtctttgatttctgcttttcctcaaatggagtgcgtcagtatcactccgattgaaaacagtgtgatatacggattaaagagcttccgtgtgaaaatgtaatagataaggagactggagattcatgaaaaagtaccatatttcgatgatcaatatcccggcgtacggacatgtcaatcctacgcttgctttagtagagaagctttgtgagaaagggcaccgtgtcacgtacgcgacgactgaggagtttgcgcccgctgttcagcaagccggtggagaagcattgatctatcatacatccttgaatattgatcctaagcaaatcagggagatgatggaaaagaatgacgcgcccctcagccttttgaaagaatcactcagcattctgccgcagcttgaggagttatataagggtgatcagcctgatctgatcatctatgactttgttgcgctggctggtaaattgtttgctgaaaagcttaatgttccggtcattaagctctgttcgtcatatgcccaaaatgaatcctttcagttaggaaatgaagacatgctgaagaaaataaaagaagcagaggctgaatttaaagcctacttggagcaagagaagttgccggctgtttcatttgaacagttagctgtgccggaagcattaaatattgtctttatgccgaagtcttttcagattcagcatgagacgttcgatgaccgtttctgttttgtcggcccctctctcggagaacgaaaggaacaagaaggcctgttgattgacaaggatgatcgcccgcttatgctgatttctttgggtacggcgtttaacgcatggccggaattttacaagatgtgcatcaaggcatttcgggattcttcatggcaagtgatcatgtcggttgggaaaacgattgatccagaaagcttggaggatattcctgctaactttactattcgccaaagtgtgccgcagcttgaggtgttagagaaagctgatttgttcatctctcatagcgggatgaacagtacgatggaagcgatgaacgcaggtgtgccgcttgtcgtcattccgcaaatgtatgagcaagagctcactgcaaatcgggttgatgaattaggccttggcgtttatttgccgaaagaggaagtgactgtttccagcctgcaggaagcggttcaggctgtatccagtgatcaagagctgctcacccgcgtcaagaatatgcaaaaggatgtaaaagaagctggcggagcggagcgtgcggcagctgagattgaagcgtttatgaaaaaatccgctgtcccccagtaaaaacataaaaaccgaaatcaatttgatttcggttttctgtttaaatattttttttcatcccgcatctccggcattctctaagaaattttccgccttttacagagcttttgaacagtgtgtaatcacagttgtcgcagcgcccgctgcgggcgtccggatattcattgaattcgtaaacgatcgatgtatcgtagccttttgtttcatattcttctttttttgtttccatgtcgtccctccgttacaagacgtgtctgctgtttatcttacagcaagcttccggcgtattcaatggattttagaggtttgggtttatcttgatttctcccttggtttgcgccaaaatagctttaataagcttgtatacataaaaagcctatgcaaagaggagaggaaacgggtatgggaaaagggttacttggaaaacgtgtggcaatcggtggctcacgaaaaacggaagaaatcagtacaatcattgaaaaacagggcggaatacctgtcatccggcctctccaaggtacagtttacttagcagagaagcaggtggagccggatttgcggacgtttgcggaagaaaaagctgactgggtcattttcacgacaggcatcgggttggagactcttgtcgatatggcagagaaaattggactgaaagatgaatttctgcaggccattcgccaagcgaaagcggcatgccggggatacaaaacgctgtctgcgctgaaaaagcttgggatcacaccggaagcttcggatgaagacgggacaacaagaggcttaatccgttctttggagcctcacgacttttcaggaaaaacagtcatggtgcagcttcatggcgaaaaagcgccggctctcatggcatttcttgaagaaaaaggcgcgtctgtcctgccgattctgccttatcagcacatcccgccggaggaggaaacggtggagcggttatgccgagagctgatgaaccgtgagatcgatgccgtttgttttacaacggccattcaggttcgttccctgtttgattttgccaaggggcgaggttatatcaatgaagtgaagaaggtattcgaagaacgcgccatcgcagctgctgtcggaaaagtgactgctgaagcactgcgggaagagggcattacgagactgcttgcgccagagattgagcggatgggtgcgatgattgttgagctggccaagtattatgaagaaaaggaataacaagtacaaaaagccgcttttccctcggaaagcggcttttgtctgtcattcattctgcttcagctgctgatgaacggtgaataatgatgggtatgtcagcacgcttaagattacacaagtcagcgcggctgaggccatcgttgtaaacacgattaagagttgaaagcgtactgcctgaatcgggtccgcgccggctagaatctggcctgtcatcatgccgggaagctgaacaagacccagtgttttctggctttcgagcgtcgggatcatactcattttcatcgctgaagtaagaatgcgctgtatggattgcttcggtgtgccgccaagtgacaatattaattgaatttcttctttgcgaacgccgacttctgagttaagccggtttagaaacaaacttgagagcaccatcgaatttccgatgaccatcccgctgatcggaatgacatatcgtgccgtaagcggaatgatatgaagagacagcagaattccctgcgtcaccatttctacgattgctaacgcggcaaacaccctccaaaacgaaccgattgtatttttctttcgcttgatgacattttgcgccgccaccgcgagcattaacagcaccatcagcaggataaaaacagggtggtctccgcgaaaaatcagcgacaaaacataaccgatgataagcagctgcaccgcggaccggatggtggcgatgatcatgtctttttctaccccggctttaaaggattttgataaaaacaaggcgatcaaaacaaagatcatcgttaaagagagagaaaggtaatccattaccgagtgcctcccttcaaaaattctttcgctgcttcatgctgcggagcggagaaaaatgtttcggtttcggcgatttcaagcagccggccatctgccataaaccaaatggtatcggctactcgttttgcctgctccatattatgagtgacccacatgactgtccattttttctcttgatgctgacgtttgatcagttcttcaatctcaagagcagaaaccgggtccaaggccgacgtgatttcgtccaacaatagaatggaggaaggatttgagagcgttctggccagtgacagtctttgccgctgcccgcccgataagtctctggcgcttctgtctaacagctctggcggcagccctgcaagagaagccagcttttcaggagagtacagctgggattgatgcagcctttgtacaagacttaaattgtcacgcactgtcccgtcgagcacgggagccgattgaaacgcgagggctgccgttctcctcagctcattgacattccattctctgacttcctttccatatatgttgacttcgccgctgtcaggcgttctcattaaattacacatagaaaggagggtgcttttgcctgagccggaagggcctaaaacggctacgattgcaccctgttgaatgtctccggtgacatcctgcagcacatcataggtttgtccatcttgtttatagctttttctgactgatctgaaggagatggctggtatgttttgtgtttgatcgtttgcttccattacaataatcacctttcaatataagtaggctgacattatatttaactataacgtgaaacagattccttttggtagcacaaataaaggagaacaggctttcacccattctcctgcagatgctacgcagtcagatttgactgtgctttctttttcggttttctcggctgtgaagcgaaggtatgtaacatcatccccgctattataatgaacaaaccggcaaatgataatagagatgggaaaacgcctgacagcagaacaatttcaccaagcagcgcgaaaatcacttcaccggattgagtggcttcaacagctgcgagtttttgcggattgtctcttaccatatcagtagcccagaaaaataaaaccgtcgcaatgatgcctgagctgacggcaacgataaaggattgaacggtttgacttgctgttggaaggccatctgaccaccagccgtaagctgctaatataagccagaatggaaggcttgccaatgtcattccaagcacgcgctgaaatgtatcaagccggcctccgtattcttcgagcattctcctgtttcctaacggataggcaaaagccgcaatgacaaccggcagcacactgaaaagcagcatcctcccagaaagcgattctgcatgctgaagctgaatcagagccgctccaatcaggatgatcacggaagtgccaagtgaaaccaggggaatcttttggcgaacgagctgcggaccgcccggcatatcttgtttgacataaaacaaaggagataagagcaccccggctacaattgtaatttgccaggttccggctatgagccaccccggaccgtatgcagccgcaaatgtaatcggcgcgtaaaaaagcacgaaaccgacgaagctccatttgatccaataaaacggctttttcctcatctctagtaagagaggcgtgaatgtccctctcatgatgacaatcaaacataaaaatggcaccataaaaataaagcgcagcgaagagctccaaagccagctgcctcctgataactccatcgctctgtttaatataaaggtaacggcgaaaaagagtgaagccaatattccgataacgatagctttcatgatatccctcattctggcattatttttttatactatactattcggtatcatgcagatcaatggaatcatgagaaaaacatcatgtttggcgaactgctatgtgtggaagacaaaaaagggaggtgaaattgatggaaaaagagacacagacatacttctttccggatgacggcaggattccgaatcaccctgattttccgctcgtggtgtatcaaaacgcgcttaaggacactggactggcagagcggatcgtcatccggcatggctggtcaaacagctggtcagggagtgtttttccataccatcattatcacagcaatacgcatgaagtcctgattgcccttaggggagaggctgtgattcagtttgggggagaaaaaggggctgccatccctttcaaatcaggcgacgcagtcgtgattccagccggagtcggacataaaaagctcagctcaagccccgattttactgtccttggcgcctatcccggtggcattcagtatgatatgaagacgggaaagcccaatgagcgagaggaagcggtcaaacagattaagcaggcggcgttgccggcgaatgatccgatcacaggaaaaagagagcctctattggaaatatgggtaaagtgaaggggagaaattgctggattgtcaataactagtgccgcagaaacgatatgacatgtgctccatataaattaatttcataatcgaagcaattcacgttcaaattttgttcaaaaagtgttatcatatagaaggtaatcgaattggagttttttgtgtttgctattttcagagagagtaaaggattttgacttattcaattgtttatttttagataaaaataatactgaatatggcaagatgaaaaactgggtagtaaacatttatttttgtaaatgattgtgcacgaattcacaatccttattcttatgccttaaaagcgtgagacagggagaggcactaccctttccaaaaaaatcagcaaactgcttatagtaaaggagaattggatatgccagaaacaatcgatcaaacaaatgcgtctgtcagccaaagccagcaagatcttattgatcagctattaaagccagaagttcaagaatcattgactgttttagttgaccagcttccgaagctgactgagttagtcaatattttaacgaagtcttatgatttcgctcagtctgtagcgactgacgaagtgttaaaaaacgacacagtcggtgcgatcactgaaattcttgagcctgtaaaagaaacagcgaaagaagtagctgcgactgcgatcgaagcaaaagaccgcgcggaagcaagcaacgaaacaattggtcttttcggcctgctgcgtatgctgaaagatcctcaagctcaaaagttgttccgttttgctaacagctaccttgaagtcatgaacgaacgcgaaaaccaaaaataatctcagattcaaattgatataaaggacggaggatatacgatgtcaaaacatattgtcattctaggcgctggttatggcggagttctttctgctctaacagttcgcaaacattacacaaaagaacaagcacgcgtgacagtggtaaacaaatacccaactcaccaaatcattacggaattacaccgccttgctgcaggcaacgtgtctgaaaaagcggttgcaatgccattagaaaaacttttcaaaggcaaagacattgatcttaaaattgcggaagtaagctctttctctgttgataaaaaagaagttgcgcttgctgacggttctacattaacttacgatgcgcttgttgtaggtcttggttctgtaacggcttacttcggcatcccaggtcttgaagaaaacagcatggtattgaaatctgctgccgatgcgaacaaagtctttcaacatgttgaagatcgtgtgcgcgagtactctaaaacgaaaaacgaagcagatgcaacaatccttatcggcggcggcggcttaacaggtgttgagcttgttggtgagcttgctgacatcatgccgaaccttgcgaaaaaatacggcgtagaccataaagaaatcaaattaaaacttgttgaagcaggtccgaagatccttcctgttcttccggatgatcttatcgagcgtgcgactgcaagccttgaaaaacgcggcgttgagttcttaacaggtcttcctgttacaaatgtagaaggaaacgtaatcgatctgaaagacggatctaaagttgttgccaacacatttgtttggactggcggcgtacagggtaacccattagtcggtgaatcaggtctagaagtgaaccgcggacgcgcgactgtaaatgacttcctgcaatctacatctcatgaagatgtattcgttgctggagacagcgcagtttacttcggtccagacggccgtccatacccgccaactgcacaaatcgcatggcaaatgggtgagctgatcggttacaacctattcgcttacctggaaggcaaaacgcttgaaacattcaagccagtaaactctggtacacttgcaagccttggacgcaaagacgcggttgccatcattggtgctaattctacaccgcttaaaggtcttcctgcttccttgatgaaagaagcaagtaacgtacgttacttaacacacattaaaggacttttcagcctggcttactaatccttttaatgaatctgacattgccaaaagcgttccttaccgagtgctttctggcaatgtctttttttatgtttatgacagcgttaacatttcattttcaaaaaagagattgatcccagaggaatataaaggtaaaataaaaacaaatcaaaatgttaacgttaacattttgaaatagaatgaaagacggtgaggacatggaacccttcatgggcgaaacctttttattgaaaaatgaaaccgctgtcagcctctatcacaattatgcgaaagacatgccaattattgattaccactgccacttaagtccgaaagaaatctatgaaaataagacatttcaaaacatcacggaagcctggctgtatggtgaccattataaatggcgcatcatgagagccaatggaattgaggagacatacattaccggagatgcgcctgatgaggagaaatttatggcttgggcgaaaaccgtgccgatggcgattggcaacccgctctacaactggactcacttagaattgcagcgtttttttggcatttacgagattttaaacgagaagtccgggccggctatatggaaacggacaaatgaactgctcaaaggggaaggcttcggggcaagggatttaatcgtgaaatcaaatgtaaaggttgtgtgcaccacagatgaccctgttgattctcttgaataccatctattattaagagaagacaaagactttcctgtcagcgtgctgcctggatttcggccggataaagggcttgagatcaatcgtgaaggctttcctgagtgggtgcaggcgcttgaagatgccgccgccatatccattgcaacctatgatgagtttttaaaggcgttggaaaaacgagtgcgattcttccactcagccggcggcagagtttctgatcacgcgatagattcaatggtatttgccgaaacaacaaaagaagaagctggacggattttttctgacagattacaaggaacagaggtttcttatgaagatgagaagaaatttaagacatatacgcttcagtttctttgcggtttgtatgcggagctcgattgggcgatgcagtttcatatcaacgctttaagaaacacgaatacaaaaatgatgaaaaggcttggacctgatacaggctatgattcaatgaacgatgaagaaattgccaagcctttatacaagctgctgaactcagttgagatgaagaaccagctgccgaaaacgattttatattcactgaatccaaatgataactatgtcatcgccagcatgatcaacagttttcaggacggtattaccccgggaaaaatacaattcggcacagcctggtggtttaacgatactaaagacgggatgctcgatcaaatgaaagcgttatcaaatgttggccttttcagccgttttatcggcatgctcaccgattccagaagctttctttcgtatacgcgccacgaatatttcaggcggatcgtctgcaatttgattggggaatgggtggaaaacggcgaagtgccgcgcgatatggagcttctgggaagcatcgttcaggggatttgctatgacaatgcgaaacactactttcaatttcaagaagagaaagcaaacgtgtaacaaagtgtccgctcagtatcgctgagcggatcactatccgaaaattcttaagacacagaggtggaacatgcgaactgaactggcaaataaggttgtgtcggtcgaaacggaaaaaaggctttcattgaaagagaaaatgtcctatggttttggtgattttggcaatggttttatgtttgatctcggccagatttatttattgaagtatttcactgatgtagcgggaatccccgctgcgatggccggcggcatttttttagtcagtaagctgtttgcggcgataacagatccaattgtcggctcatcaatcgattatcgcaaaaacatcggcaaacgggggaaattcaggccttatctattaatcggcagcctcgtgcttgcggtgcttactgttcttatttttctgtctcccaatgtatcaacgactggaaaactgatttatgcatatgcatcctatatgatttggggcatcggctattcgtttgtgaatattccgtacggctcattaggggcagcgatgactcaaaattctgaggaacggacctccatttcgacgttccgccaaatcggatcacttggcgccttgtttatcacaagtgttgccgtgatgccgctgctcatcaagtttgataatccgaaggtcggctacccggtggtcatgggcttgttcgccgcactcggtgtgctttggttttatatttgctaccgcaactgcaaagagcgcattgtcatatcggaagcacccaaagaaaaattaacactctcatctgtcgtcaaaacatttattacaaataaaccgctgttaacccttgtcctgatgacgattttttcaatttccgcatacaacattaaatccgccatgctcgtctatttcgcacaatataacctgggcaatgttgaattaatggcttatatgaactttataattatcggttcttcctttttgggcgtcgtattccttccaaagctcgtcaagatgtttggaaagaaacgaacggcaatgatcggcttcggcatcagtgtggccgcggatctgatcaactttatgcttccatctaacgtttatgtgtttacaattctcgccagtatcgcctttattggaatcagtatcccaaatggcatcacgtgggctcttgtctccgatattatcgactatggcgaatggaaatccggtgaacggaaggaagcaacgacatattcacttttcaatttctccagaaagcttgctcaatctttgtctggctttctctcggggatcggtttggggattatcggctatgttccgaatgcagtccagacagcacaggcgctgattggcatcaaagcgctgcttcttctgtatccggccattgctttggcattagcgatgatcattatcagctttctttataaactcacagaccagcagcatgctcagatcgttcaggatcttcatcaaaagaactgacaatataatataaagaatatttaaaataatttgtaaataaaatgtgtttgtaggggtttcgctaggggagtgcccaaaaaactgaaaaggaaggaggcacttgtttgaaaacgataacaattgcagctaaagaagcaaaggaactcgttcggcaaaagctggccagtgccggtttgaatgaacgagatgctgaaaaagtagcagatgttctcgtgcacgctgatttgcgcaatgtacattcgcatggcgtgctgcgcacagaacactatgtaaacaggcttttagcgggagggatcaatcctggggcacagcctgtttttaaagaaacggggcctgtgaccggggtgcttgacggagacgatggtttcggtcatgtgaattgcgacatggcgatggaccatgcaattgacatggcgaagaaaaaaggagtcggcatggtcacggccgtaaacagcagccattgcggagcgctaagctattttgtgcaaaaagcggctgacgaaaagctgatcggaatagcaatgacgcatacagacagtatcgttgtcccgtttggggggaggactccttttttagggacaaatccgattgcttacggtgttccggctaagcataaaaaaccgtttatcctagatatggcgacatccaaagtggcttttgggaagattctgcaggcccgtgaagagggcaaagaaattcctgaaggatggggagtcgatgaaaacggagaagcagtaactgatcctgacaaggtcgtctcactttcaacattcgggggcccgaaaggctatggactatcgattgtggtggatgtattttcaggattgctggcgggcgcggcttttggccctcatattgccaaaatgtacagcggtcttgatcaaaaaagaaagctggggcattacgtttgcgcgatcaatccagccttttttactgactgggatacgtttttagagcagatggatgccatgattgatgaactgcagcaatcaccgccggctgttggattcgaaagagtgtatgtgcccggcgagatcgagcagctgcatgaagaaagaaataagaaaaacggaatttctatcgcccggagcgtgtatgaattcttaaaaagcaggtgagaaaaatgaaagcggttcaagtgcgaaaagcgtatgatctggtgacagtggaggtgaagaagccagttctttcaaaggatgatgaagtgctcgtgaaagtcaagcgagtcggcatttgcggttcagacatgcacatttatcatggaacgaatccgctcgctaccctcccgagagtcatcggacacgaggtaacgggacaagtgaaggaagttggtgcgaaagtacagagcctaaaacccggtgatcatgtggtaattgagccgatttcttattgcggatcgtgctatgcctgccgcaaagggcggccgaatgtttgcgccaagctttctgtatttggcgtacatgaggacggaggcatgcgggaatatattgtgcttccggaaaggcagcttcacgcggtctcaaaggacttgccttgggaggaagcagtcatggccgagccttatacgataggcgcccaggcagtgtggagaggccaggtggaaaaaggtgataccgtcctgatccagggagcggggcccatcgggatctgtgtgttgaaaatggcaaagctggcgggtgctgttgtcatgatgactgacttgaacgatgagcggctggcatttgcgaaagaaaacggcgccgatgctgttgtaaatgtccaagcagaacatgttgccaagcgggtccttgaatggactgggaatgaaggagcaaacgtggtcattgatgctgtttgcctgccggagacttttgcgctttcaattgaggctgtgtcaccggcgggacatgtggttgtgcttggatttgatgaaagagcggctcagatttctcagctgccaattacaaaaaaagaagtcacgataaccggatcgcgattgcagaccaatcagtttccaaaagtggtagagcttttgaatggaggccggttagtgcataacgggctggtgacccatacattttcagttgatgacgttcatcatgcatttcagtttattaaggagcatccagatcaggtgcgaaaagccgtcatcacgtttgattaaatgactgaatccggaggtgcgagcatgaatatgacattccgatggtatggaagaggcaacgatacagtcacacttgaacacgtgaagcaaattcccggtgtcaaaggcatcgtttgggctctccatcaaaagcctgtcggcgacgtgtgggaaaaagaagaaatcagagccgagaccgaatatattcaatcctatggttttcatgctgaagttgtagaaagcgtgaatgttcacgaagcaattaaacttgggaacgaagaacgcggccggtatattgaaaactacaagcaaacgatccgcaaccttgccggatttggcgtgaaagtgatttgctataattttatgccggtttttgactggacacgcacggacatgttccggccgctagaagatggatcgaccgctctgttttttgaaaaggccaaggtggaaagccttgatcctcaagagctgattcggacggtggaggatgcatctgacatgacactgccggggtgggagcccgaaaaattagctcggatcaaagagctttttgctgcctacagaacggtcgatgaagaaaagctatgggacaatttatcattctttttgcaggaaattcttcctgttgctgaggcctatggtgttcaaatggccattcatccggatgacccgccgtggccgattttcggactgccgcgcattatcacaggagaggcaagctataagaaactgcgggcgatatcagattcaccgtctaattgtatcaccctttgtacaggttcaatgggagccaatcccgctaacgacatggtggagatcgctaaaacgtatgccggcatcgctccattttcacatattcgcaatgtgaaaatttatgagaatggcgattttattgaaacatctcatttaacaaaggatggttcgatcaacattcaaggcgtgatggaagaactgcataagcaggattacgaaggatatgtcagaccggatcatgggcgccatctttggggcgagcaatgccgcccgggatatggcttatacgatcgggcacttggcatcatgtatttgaacgggctgtgggacgcttatgaagcaatggcaaaaaaagaggtgggcatatgatcccgctgcatgagaacctggctggtaaaacggctgtcatcactggcggcagcggcgtgctttgctctgcgatggcccgggagctagcccgtcatggcatgaaggtggcgattttgaatcggacggctgaaaaaggccaagcggtcgtgaaggagataacggcggctggcggcacagcgtgcgctgttgctgcggatgtgctggacaggatgtcactggagcgggcaaaggaagacatccttggccaatttggcgctgttgatctgttaattaacggggctggcggcaatcatcctgacgcgataaccgatgtggagacatatgaagaagcgggagaaggccaatccttttttgatatggatgagaggggctttctaactgtattctccaccaacttcaccggtgcgtttctggcctcgcaagtgtttggtaaagaactgctgaaggcggattcacccgcgatcatcaacctttcttccatgagtgcttattcacctatgacgaaggttccggcatacagtgctgcgaaagcatccatcaataattttacgatgtggatggctgttcattttgccgaaaccgggctgcgggtcaatgcgattgccccaggcttctttctgacaaaacaaaatcatgatctgctgatcaaccaagacggaacgttcaccagccgatctcacaaaattattgcgggaacaccgatgaagcgcttcggaaaacccgaggatttgctcggtacgcttctttggctggcggatgaatcctattccggttttgtcactgggatcaccgttcctgtcgatggaggatttatggcttattcaggtgtgtaacgaaagcggtgcaacagaaactgaaccaacataggggtgaggttgagatgttttcaaaagataagcttcccgttatcctttttttgttcctggcaggggtgattaattacctggatcgctcggcgctttccattgcagctccttttattcaggatgatctcacattgtctgccacgcaaatgggcttgattttcagcagtttttcgattggttatgcgatttttaactttcttggtggcgtggcatccgaccgctatggggcaaagctgaccttgtttgtcgcgatggttgtttggtcgctgtttagcggagcagtcgccctcgcttttggttttgtcagtctgctgattatacgcattctcttcggaatgggagaaggcccgctttcggcgaccatcaacaagatggtgaacaactggttcccgccgacccagcgggcgtctgttatcggtgtaaccaacagcggcacgccgctcgggggagccatttccggcccgatagtcggcatgatcgcagtggcgttcagctggaaggtatccttcgttctcattatgattattggattgatatgggcagtgctctggttcaagtttgtcaaagaaaagccgcaagagacgattaaggaagcaccggcaataaaagcagaaacgtctcccggagaaaaaattccgctcaccttttacctgaagcaaaaaacggtcctgttcacggcgttcgcttttttcgcttacaactacatcctcttcttctttttgacgtggtttccgagctatcttgtcgacgagcggggattaagtgttgaatcgatgagtgtcattacggtcatcccgtggattttaggctttatcgggctggctgcggggggatttgtttctgactatgtgtacaaaaaaacggcccgaaaaggtgtgctgttctcgcgcaaggttgtgcttgtcacgtgtttgttttcatcagctgtcctgattggatttgccgggcttgtggcaacgactgcgggggctgtcactcttgtcgctctgtcagtgttctttctttatttgaccggtgctatctattgggctgtcattcaagatgtggttgatcaaaacaatgtcggttctgttggcggcttcatgcatttcctcgccaacacggcaggaattatcggcccggctttaaccggatttattgttgaccaaacaggcacgttttctggagcatttttgcttgccggagggctggctgtcttcgcttcacttgctgtgattcgttttgtccgtccaatcatcggcaagccagcgggaacagaagctaagaatcctgtgtcttattaatctggaaatatagtgggagaggcggtatatttgatgatacaatatacagtaaataatcgcagccggtatgataaggaagggaattagatggtaaccataaaagatatcgcaaaactcgcaaacgtatcccacacaaccgtttccagagcactcaacaacagcccttacatcaaagaacatacgaagaaaaaaatattagagctagcagagcagctcaactatacaccaaatgtaaatgcgaaaagtttggcgatgcaaaagtcgcatacgatcgggcttttctttacaagcattacaaacggaacctcacacagcttctttgcagacacaatcaaaggcgtcaatcaagccataagtgaggattacaatctgtatgtgcgcggcattgatgatctgaaaaactatgactccgttacaccgatgagatatgacggcatcattttaatgagccaaagtgacattgataattcttttatttaccatattcgcgaaaaaaacattccgcttgtcgtgctgaatcgtgatattgatgatcgcaccatcacgaatattttgtctaatgacaaggaaggctctcaagaagctgtagaatacttcattcagtccggacatcaagacatcgccatcatcgaggggatcgaaggctttaaatcctcccagcagcgaaaggaaggctacttatctgcactgattcaacatcatattccgatcaagcatgaatacagtgtcaaaggacagtacgatatggaaagcggctttcaagcgatggagcggctgctggcactgccgaatcctccaaccgctgttttttgttcgaatgatgacatggcaatcggagcgatgaatgcgatattcgcaaagggcctgcgcgtccctgatgatatttcggtgatcgggtttgatgatattggtttttcacagtacatcacgccaaggctttcaacagtaaagcgcccagtggagaaaatcagcgtgcttggcgcgcaaaaactcttgtctctgatcagcaagcccgaaacaaaagcagaaaaaatcttggaaaacacagaatttatggtgcgtgattcagtcaggcgattgacgacgtgatgtcccgtttttcagcgggcattctttatacagaaaaatgttaacgtgtgcataaaaggagagggaggcaatacgggtgcagaagctgaataaaaatgtgtacgatcactatactcagtatccagaaaaaattctccagttcggagaaggaaactttcttcggggatttgtcgattggcagattgatcaattgaatcaacacactgattttaatgggagcgtggcagttgtccagccaagaggctcagaaaaaatcaaacgattaaatcagcaagatggattatatacgctttttttacaaggaatgaaagacggagaagcggtaaacgagcatatgattatcaactcaatcagccgggggattgacctgttttctgattatgaagcatacaaagaattggcatcaagcgaaaggcttcggtttattatctccaacaccactgaggctgggattgtatgtgatgaaaaagatcgtttagaggataggccgcaaaaaacattccctgggaaattaactgcatttctctacttccgctatcaggcttttaaaggagatcagacaaaagggtgtgtcctaatcccatgtgaactgattgagaacaacggcgaaaagctgaaggaaacggttcttcattatgcaggtctgtggaagctggaggaaggatttacacagtggattcatgaggccaatacattttgtaatagtttagtagaccggattgttccgggttttcccgtcgacagcattgatgagatcacggcggatcttggctatcaggatgatttgatagttgtgggagagcaatattatttatgggttatcgaggggcctgattggattggaaaagaacttccctttgcggctgcagggctccatacaaagatcgtcagcgacctcaccccataccggactaaaaaagtaagaattttaaatggcgctcatacagcaatgacgccagtggctttattatacggcttgaagactgttagggatgcagtcgagcatccggaagttgggcgatttataagagagctgattgatgacgaaattcttcctgttttaaaaatggaaggtctttctcagtatgctgacgatgtgctgaaccgttttaaaaacccgtatattaagcattacctggaaagcattgcattgaacgccatttccaaattcaaaacgagaaacctgccgacacttaaggaatatgctgaacaaaagggacagcttcctgaacgcttggtgttttctttcagtgctcttctgtatttttatcataataatgagacattgcaggatgatccggcagttcttcaatttttcaaagaggtttggtgtcaggaggatggcgacatgcttcggattgcatcaagagtgttaggcgaacagtggctgtggggggcagatctcaatgagataccgaagctgactgatagagtcgctgtttacttgaatcatattcatgagctgggcatgcagcgggctcttgaacaatactgcatacaagggggagaggtacgttgaagtcgtttataaagattcataagcaagataatgtccttcttgctctgcgggatatccaaaagggagagaggctgcatgcggacagcgtgtcgattgaagtaaaggatgatataaaaagaggccacaagattgcattgaagcctattaaaaaaaatgacagcatcatcaagtacgggtttccaatcggtcatgcatcacaagatatatcgatcggagagcatattcatgtccataatacgaaaacaaacctgtctgatatccaatcatacagctatacaccgagatttgatgaaaatccgtattctaatgagaaccggacgtttaaaggttttagaagagaaaacggagatgcgggtgtacggaatgaattgtggattgtcccaactgtcggctgtgtcaatggaatagcagaaaaaatgctgcagcgttttgtcagagaaacaggggatattgctccatttgataacgtactggtgttaaagcatcaatacggatgctcgcagcttggcgacgatcatgaaaatacgaagcagattctgctgaatgccattcgccatccaaatgccggcggcgtcttggtgttagggcttggctgtgaaaacaatgagctggcaagaatgaaggaagcactgcaagatgtgaacttgaagcgggtgaagtttctggaatcccagtcggtgaccgacgaaatggaggcaggcgttgctttgctgaaggaaattcatgaagcggccaaagaagataagagagaagacattccactgtctgaactgaagatcgggctgaaatgcggaggttcggacggtttttccggcataaccgcaaacccgctgcttggacgtttttcagattatctcattgcacagggagggagcacggtgctgacggaagttccggaaatgttcggcgcagaaaccatcctgatgcagcgggctgccaatgaagaagtgtttcataagatagtccaattaatcaatgattttaaacaatattttatcaaacatgatcagccggtgtacgaaaatccttcaccgggcaacaaagcgggcggcatttctacacttgaggataaatcgctgggctgtacgcaaaaagcggggatttctcttgtcacggatgtcttgaaatacggggaagtgctcaagacaagagggctgacgcttttgagcgcgccgggcaatgatttgatcgcctcctccgcattggcggctgccggctgccaaattgtcctctttacaacgggaagaggcacgccgtttggcacctttgtcccgacggtgaaagtagcgacaaacaccgagctgtatgaggcgaagccgcattggattgattttaacgcaggtcttttagcagaggatgatgttcatgaggaatatgtgctgcgtgagtttatccactatatgattgaggtggcaagcggccagcttgtgaaccatgaaaaaaatgatttcagagaacttgccatttttaaatcgggtgtgacgctataataagaaaaggctatccttcaagcggatagccttcttcattaaatcaattttaaaccgctgactaaaataatggacgccataataaattgcagcggacgcggggagaatcgaggcgaaagatggctcccgatcagcacgccgggaattgaaccgaggagcagattagctgccagcatgtaatccacgcttccgaagcttgcgttcaaaatgcctgctgccgtaacaagaagaaaagcatgcgcgatatcggttccgacaatctgtgacgctttcatgttaaataagtaaatcatggcaattgcaaataatgagccagaaccgattgatgttaatccgacgataaacccaaacacaacaccaataagaattgtcagcgccctcttattttcaagcggcatcagctgccagcggttggggcgaagttttctatccaaaaacaaacgaacgatgattgaaatggcaaccagcgttaacacatatcctagagcgtgcttaataatttcttcctgatgctggtgaaaggcggggaacaaatgcaatatgccaatggctagcgaagcactcggaatactgccgatggctaagtattttaccaatttaaagttaatcgttttctgccgccaatgggaggcaacgccaaacagctttgtgatcgagttatatacaagatccgtaccgaccgcgatggaaggattaattccaagcacaattaaaaggggagttaataaggccgctccacccactcccgtcaatccgactaaggctccgacaaacaaacccatcaatatgatgcttacactcatgataaaggcctcctgaaaacccgactatttttatcagattatatatgattaggacgcgttaatcaattaaattttttgaatttttgcacgttagctgcttgaaattttggtatgctcaatatctctattcatttgccctataatgagtgtctggacgaaatcgagaagtactaaaggcgcaaaaaaaagatacctcttaacaggtatcttttttcttgtttacgctacatgcgctgctgatagaaaggaagctcagtgtggcccatttcccgcacatacacgaacaggttgcctttatggtgaatttcatgctccattgcaagctgaagcagcgcgcggcctgtgacttttctgccgaaagcggatgtcagatcaatttctctgtccagctgctcttcagtcagctgttcaaggatagcggccgttttttctgtatatgtttttgccagaacattgagatctgtttctgtttcctcctgcttgttttgaaatggtgaggcattgccttccttaatgacatttgcgaacaagtggaaagacgtaagaatgtgtttgaccagttcttctgctgacattgatgtttctgccggtttgtagctgtaatggtctttgctgattttttcggcaagctcattggtcacgtttcgatgggataaaaaatggctgacaatttgattggattggctcattatgatctcctccatatgtaaaaataaatggtgcaatgaaatcctatatcaacggttatgaattcacaagtaatatgctgtgggatgaaacaaaatgctatgtcaatcgtatatataacgttcacaaaacatgaaatggagtataaacatgactaacatacctttcatttatcagtacgaagaaaaagagaatgaaagagctgcggcgggctacggcactttcggttaccttatcacacggattgaagaaacgctttatgatcaatacggtgtattctatgagctctatgccagtgatgatccaaatacggaatactgggagcttcttgtagaagatgtccgcagcggttcattggagcctgagcatgtggcatatatatttgaaaagcttgaaaagaaaacctttgcttacgatgaagatgagaaagaaccggattataccgtccataagtctataagaaacagtgtatacgcgtatcctgaaaagggagttgcttttgccagaattccatattttcaagatgggagcattatgagttttgattgtctgtttgcggttaacgatgaaaagatgcgtgcatttctggagggagtcagaccgcgtctttgggaaaaaagcaagcggaaagtgaccgtgtttacggatggagatggagggacttcaagagagcaggaagccattgtcagagaggttcagcggagtcaagtcatcatgaatccgctattgaaaaaagagatatacagatcaattgatcagttttttcatagtgataaatcgttttatcaaacatatgacatcccttacaagcgcggcattctgttatatggacctcctggaaacggaaagacgacgttagtgaagtcgatcgcaggcagtatcgatgcacctgttgcttattggcaaattactgaatttacgtcgagcgagacaatagaagaagtctttcaggcagcgagacgcctcgctcctgcagttctggtcatcgaggatatagattcgatgccggaagatgtgcggtccttttttctcaatacgctggacggcgcgacatcaaaagaggggctatttctcatcggtacgacaaactatcccgaagagatcgatccaggtttgatgaatcgtgcagggcgatttgatcgtgcctatgaaatcgggcttccggatgaagagctgcggctggaatatatgaaaatgagaggctttggcatctttttgagtgaaggagaaataaaaaacgccgcaaaacttacagaaggcttttcctttgcacagctgggagaattatatgtatcttcagcccttcaatggcaccaagaagggaatcaccatattgaaaccatggtgaaagacatgacaggagagcaaagaaaaagccagcggggaagctggatggaaagaaacaaagtcggttttcactaaaagaaagcacgggtgtttgaaaaacccgtgcttttttgttgcggttagccgaaattcgacaattgcggttattttgcgttcttctttttcttgcaaatatgataaaatatgacatatctcgggtaattcaaaaaggggggattaattgaggatgaagcagacgattccgtcctcttatgtcgggcttaaaattaatgaatggtatactcatatccggcagttccacgtcgctgaagccgaacgggtcaagctcgaagtagaaagagaaattgaggatatggaagaagaccaagatttgctgctgtattattctttaatggagttcaggcaccgtgtcatgctggattacattaagccttttgaagaggacacgtcgcagctagagttttcagaattgttagaagacatcgaagggaatcagtacaagctgacagggcttctcgaatattactttaacttttttcgaggaatgtatgaatttaagcagaagatgtttgtcagtgccatgatgtattataaacgggcagaaaagaatcttgccctcgtctcggatgatattgagaaagcagagtttgcttttaaaatggctgagattttttacaatttaaaacaaacctatgtttcgatgagctacgccgttcaggcattagaaacataccaaatgtatgaaacgtacaccgtccgcagaatccaatgtgaattcgttattgcaggtaattatgatgatatgcagtatccagaaagagcattgccccacttagaactggctttagatcttgcaaagaaagaaggcaatccccgcttgatcagttctgccctatataatctcggaaactgctatgagaaaatgggtgaactgcaaaaggcagccgaatactttgagaaatctgtttctatttgcaagtcggaaaagttcgataatcttccgcattctatctactctttaacacaagttctgtataaacaaaaaaatgacgccgaagcgcaaaaaaagtatcgtgaaggattggaaatcgcccgtcaatacagtgatgaattatttgtggagctttttcaatttttacatgcgttatacggaaaaaacattgacacagaatcggtctcacacacctttcaatttcttgaagaacatatgctgtatccttatattgaagagctggcgcatgatgctgcccaattctatatagaaaacggacagcccgaaaaagcactttcattttatgagaaaatggtgcacgcacaaaaacaaatccagagaggagattgtttatatgaaatctaaatggatgtcaggtttgttgctcgttgcgatcgggttcagctttactcaggtgatggttcatgcaggtgaaacagcaaacacagaagggaaaacatttcatattgcggcacgcaatcaaacatgatgcataaaaaaagacccttaggggtcttttttatttcttcagcttccattcttttatcgtcagctcagaagatccacttgccaccagcggatccgcatggccgatttccgctgcctcttccagtgaatctgcttcgatgacatacgctccgcctgtggcgtcgctgaatggcccaaacatttttaaacgtttttctgcctgtaaacgatccagaaattcatagtgcccagccacatgctcctgattaaatttctccgttctcattgtcagcattaaatatgtatacatattcagaccctccgtgaacttcagtttaacacatttatccatattacagtgatagatgatatgagcttttcgtcctacgaatgccacctatttatgaaaaaagaaaaggagagatgataggtgagcattccagtaaagaaaaatttggtttctgaggcgaaatacgcgttgaagtgtcctaatgcaatgtccgctgaatacattaccattcacaacacggcaaacgatgcgtcagcggccaatgaaatcagctatatgatcgggaacacaagctcgacaagctttcattttgcagtcgatgatcaagaggtgattcaaggtctgccgcttaaccgaaacgcctggcacacaggtgacggcacaaacggtccgggaaaccgcaaatcaattggcgttgagatttgctacagcaaatcgggaggcccgaagtatgaggcagctgaagccttggcgatttcatttgtagcacagcttttgaaggagcgcggctggggcatcgatcgggtgagaaagcaccaggactggaacggaaagtattgcccgcaccgcattttatcagaggggcgctgggatcaagtgaaggcggcaattgaaaaggaattaaacgggggcgtatcagctaaaaaagctgcagtctcttcttcagcgtctgaatatcatgtgaaaaaaggcgacacattgtcagggattgccgcatcacacggagtcagtgtgaaaacgctgcaaagcatcaatcatattactgacccgaattacattaaagtcggacaagtgatcaaactgcctcagacggcatctgcttctaaaagccatgccgcatcctcatatccgctcccatcaggcgtgatcaaagtgacaagcccgctgacgaaagggacaaaagtaaagcaggtgcagaccgctttagccgctctttatttttatcctgataaaggagcgaaaaatcacggcgttgacggcgtttatggcccgaaaacagcaaatgcagtgaaacgttttcagtctgtcagcggtttaacggctgatgggatttacggtccgaaaacgaaagcgaaaatggaggaaaagctgtaaataaaaagacggaagctgtgaagcttccgtctttttatcttacatacaaactgcggcaagcaccttttgaatatcataaatgctctcatcttttttaaactgctttgagacggcaggaagttctgcgccggaaatccaaattttcagttctgaatcgaggtcaaagcggccggccgtttccacgctgaatctggaaatgcttttgtacggaatcgattgaaattccgttttcttgcctgtgattccctgtttatctacaaggataagccgcttgtcagtaaagacaatcaaatcgcgaaccagcttaaacgcggcttcaacattctcaccctccagcaaaatatgggcaagctcttctttcacagcagccgttgacagtgttgacgcattgccgagtaatccatcaataaaccccatcatatacctcctcttcgtattctatcaaatcatactataaaaaaggttttcattcatggatgagtagagtaaacttgtgctgactggtaaagggggcgttcaaaatggaagatatgtatgacagctttgcagccctttctgcttctgagtcggagtatcggattatttatgaggagaaaaacggaagtgagcttattgtcctcggtcctcacggcggcagaattgagcctggcgtcagtgaactggtgcgggcattttcggatcgatgttccatctatttgtttgagggtctaaagcagcgaaacaaccgttccttgcatctcactagcattcgttttgatgagccgctggctttagaaaaagtgaatgaccaccattacgcattagcgtttcacgggtattatgatccgaaaatcccgcatacattggtcggggggcggatcgtaaaaaagccaagctcatttgtgagcgtctgaatgaagcgggttttagcgccgagctcaccaatgagaaagaccgcctggcaggtgtacacccaaacaatattgtcaatcggacgaaaagagaaatgggactgcaattggaggtaagcacggcacagcgaaatgcgctattccgcaattttgggtgccgtgataaaagctacatacaaaacgatttgtttgatcgatatgtggaagccgtcaagcttggcttttataaataaaactagacgggacctgcacggtcggcctattccttcatacgctggggttgtgcgaaagtgtggggaggaatgattcatgttttatcatataaaagagcttcaatatcaagcaaagccagctcatcctgatccggtttatgcgaaaaaacttcaagaggtgctcggcggccaattcggtgaaattagcgtcatgatgcagtatttgtttcaagggtttaactgcagggcggatactaagtatagagatttgttatatgatgtggggaccgaagagattgggcacgtagaaatgctggcaacgatgatttccagacttctggacaatgcacccgcggatgtacaggaggatgcttataaaagcaatcccgctattgcagcagtcatgtcagggatgaatcctcagcacgcgattgtgtccggattgggggcgatggcatcagatagtgagggctatccgtggaatgcaaaatacattatctcaagcggaaacttgctggccgattttcgcgctaacttaaatgcggaggcccaaggacgccttcaggtgacacggctttatgccatgaccgatgatccaggggtaagagatatgctgtcatttttgattgcaagggatacctatcatcaaaatatgtggtatgcggccattaaagagctggaggaaagagaacgggatattgtcgtcccgacgacgtttccgcgtgagctcgaaaaacaggaagtctcctatgacctgtttaatttttccaggggggatgaaagctcacaaggaagatgggcacatggggaagcctttgacggccggggtgaattcaggtatatcccggctccgattgcgttcgcatctgcgcctcatcttaaaccggcgcccatgtggctgcataatacagttcccccaatgtcgaaatgttaggttctcttctgggctgaggaatatatcctcagcccttatttgatcagatgtttttgccaatatgatataacgctttttcctcagcgacctgcaagtgctgttgatcgccttcctcgtacgcatgtggccgcttgtgagataataaataagcgagccgcttctgaaattgaatacctgctttacgccgttcaaacatgtcaagccttttatcagcaaattcctttgttacccggaataccgccgaaattgtggcgagtgcctggcttctccattgcggcagttccatctgcaacagcataaaggttggcacacagaagtggtacataaattgatttgcctggaattcttgaagctctctgaagagcttgttcatctgaaaatgattgcctgcatgctttaacacgtggcacagctcatggccaaaatcctcccattgctcttcccgtgactttttttggtttaatacgatactatacatgccgtcgtatttcaccatcatgctccccatatcctcaaaatgcacccgaatatccagatcctttgcgattttcagcatgtcaatgtgatgaggggatgtgatgcccagccggccgtataaatttttaacgtattcctccagatgtgataagtaatcgcccaattgaatactccctttcgaacatttgttctatttttagcgagaaagaaaagcccgtataggactggaaagtagcgtagaaatctttcccttttctttaaaaaataaacacttttttctttatatcggtctactttttatatgttttagagaacagagaacgatttatttatttttcggtttgcggtttttctctttttcttttaaatagttgataaattcgatggcctgctgtttgctttctggggaaaaatcctgcatatcgcggtatgcaagctgcaggtccggatctgagaacatatcgtcatcggattttttgtctttccccgttaataagtaatcagtcgttacttgaaagtaatcagccagcttttggagtgtgtcgtaatcaggttcgcttcgcccattttcatagtgggaatatcgtgcccgtgacacaccgatgtgtgatgcgatctcttcctgtgtccttttccctctgagactcttcaatctgccgcctatcatactatgacctctcttttttaaactccctacgttacttatgattatagatacaaaatgtatcaaaataaagttatgataaaaaaagtatcaaaaataacttgatgatacagattgtatcgtttatacttggtaacatccgatacaaaatgtatcaaaaaagatcaggagagtgatcacatgtatccgatccaaatcgtttttagtgaaaatcccatagatcagcgccatctcggacaatccggcggcaccatttcgtttaccgcatgcggccttccggtgtttcactttgaaacgcaggaacagtttcaagcatacatgatgttaaaaggagaagcggcgtacaatgaaaaacgataaaagctatccttttccgacgtattcagggttattgaattcagaacattatgacaaaattggcccggcgttatggctgtttctctggtttatcagctcaacaacaaaagaaatcgaaaaagacggcgtaagctggggcatcgtactcggccataagccgttaaaagcgagagaaatggcggcagtcttcggcgtaagtgaaaaaaccgtcagaagatggctggagcttctcgaaaaccatgattacataaaggccgtccgtgcgccatacggactgatgatttcggtcaagcattccaaaaaattcagcttcagatcggacaatactgtacacgggagtctaaaagaacggccattttcgccgcagacaccggacacaaacgaccgtacagatatagataaaacaaacaaatatactgctgctgatgatgcagtggatcacattgcgaagcggtttacacaattacggtcggctcaagaaggacgcaccgtgtatccttcctcaagagattatcaagccatcgcccgcattgttgccattggcgttcctgtcacgcaaacaatcaaatggcttgaagaatgctttcaggcttttgaaaaccggcggaccgccgcttctgaaacaatcaaggcttttcgctactgctcgaaattcattgaagatcgatttttcgcgcagcaagccaaaaagaatgccgcaattcagcatgagaggatgaaaaaacatgacaaaacgaacaatcgaacagattttggacgagctgagaagagggagacgtccattactggcggacaaaccggccgaatcagacgcaagcaggtatgattgcctgcgctgcaaggatcagggaggttatctcgtcagacagaatggcctggaagtctggacgatgtgcagctgcatggcagaacgaaaagtgaagcggctgctgggtgcaagtgagattacccacgctttcagacagctcggcttcaaggaattccgcacggagggaaagccgcaggccataaaagacgcattggagtgtacaaaagagtatgttgccgattatgaacaaatcaaggattgccgaaaaaacagcattgcccttttaggacagcccggatcagggaaaacacaccttttgaccgccgcagccaacgaattaatgagaacatgctatgtgcctgtcatttattttccgttcgtggaaggctttactgatctgaaaaatgattttgccctattagaagcgaagctgaaccggatgaagcaggcggatgtgctgttcattgatgatctgtttaaaccggttaacggcaaaccccgcgctacagattggcaattagagcaaatgtattcggtactcaattatcgttacttaaatcataaaccgattttgctttcaagcgagctgacaattgaagcacttgtacgggtcgatgaagcgctcggcacgagaatctatgagatgtgcagtgactatttagtgattatcaaaggagcagcctacgagcttaaccatagattggagggcgtcagataatgtgcaagctttgtcaaacaaagaaagtcattgtggaacataccggtattggggtcgtttttcatccatgtccgaactgtcggtccggtactgacttaacgcctgtcattcaaaagctggagcaaatgctgacagcgggaaaagcgaggctgaatatctatgattaaacagctgactgcactaatcgctttgctgtttcgggcaaagcgaacagaaaaaaacattgaacaatggtataaggacgacgggaagtgaaagtgttggaaaaaacaaaacagacagagaaaagccctgcgccgtggcgtgctgtcccgtgcggggatacgaaaccgatctatatttattcagcttacagtgaagaagaaaaagaaagattcccatattcaaacggacggctgattgccgctgtatttgaccttagctcttattcgcaaaaaagcaatgccgctttgatggccgctgcgcctgaattgctggaagcgtctaaagcagcgcttgattttctgaaagggaattctgttcattcaaaggagcgcatcattcagctattagaaaaagctgaagcaagcgctgcaccgaaaaggggaggaaataaaacatgattcatcctaaaaaactgctgcatatcgattccgtcacgcttaagagccagctggaggacgggaaaatccgtgtcattattgtggatggcatcaagcaagaagcatggatcacagaagcgcccgagcatggaaaaacgctcgtcgaaacaagaaagggcgaccttgcccgagtggaatttgaaatcggctacaaattaaattaaagcgaaaacagaatacgtccaagacggaaagcctgcggacactgatcaactgcacagcatttgtgcgttgattggtgtccgttttttatttgccaaaaatgaggaggatcatagaatgcaagacttactatttgaatataaacgaacgctcaaacaaacaagaaaccaatataaaccgctcgctgaggcagatgaatccgtgctctcagctgaagagctgaaggataaaaaaatcatcagaaatatgattactgatcttgaatatgtaacagaatggcttgaaaaaggaaggcagcccggcatcagacgggcgattgaccggcgtgatgcttaccagcggctgatgatcaaggacccgagaatcatcgaatcattttccagcgctatgatgtttgagccggacggacaggtatcagaagaagacagagatagaattcgagaagcattagccctgttaacggacagagaaaaggaaatgtttttgctgcataaggtagaatgtttttcttatgaacggatcgccgatcttctcggcgtaaaaaaatcgacagtgcaaacgacgattaaacgggcgagtttaaagatgcaaagacagcaggaagacatgaatcgatcacttgcctgaaagcttgtcatacgtttgccacctataagtgaatagagcatgacacataagcggctggctgatcagccgcttttatgaataaacaaccatgctggaggtggcggtgatgccgtagcatgaaaacacaacttcgcgaacaagcattagcaatctatcaacaacatcaaggaaagatcacaaatcgggcgatcgcggacacaatcggtgtttccccgaaaacaatcggcatctggaaaaaacaagacaaatggaaagaggccctgttttctgcgtccaaaaacgaacaaaaacagcgccctatagacaacgatgaattaaatgaacgccagcggctgttttgcctgtattacgtcaaaagcttcaatgccacacagtcagcaatcaaagcgggctattctccggacagcgctcatgtgacgggcagccggctcttaaaaaacgaaaaggtcgctgctgaaatcagacgcataaaaaaagaaatggtcaatgaaatgtttattgaagcgatggacgtgctgcaggtttatatcaagatcgcgtttgcggatattacggactatgtgaccttcggaaaaaaagaggtccaggctgtcgggaaatcgggtccgctgtttgatgaagatgataatccgattatgaaggaaatcagctttgtcgatgtcaaagactccgggctcgttgatggcaccattgtaacggaagcaaagcttgggaaagaaggcattgccatcaagcttgcagataaaatgaaggcgcttgagaagctatccttatattttgatttgtttccagatcaatttaaacaaaaaattgaaaatgagaagttgaagcttgccaaacaaaaagcggagaaaacagatgacagccaagagccgattgaaattatgatcaaacgaaaagagggcaagtcatgattgtaaaagaaatcaaccctcatttcgaagattacgtgttcaattgggagcagacgtaccaatttctcgtcggcggctacggctcatccaaaagctatcataccgcattgaaaatcgtgctaaagctgctgaaggaaaaacggacggcccttgtgatccgggaggtgttcgatacccatcgggattcgaccttcgccttgtttcaagaggtgatcgaagagctcggtctcacaaaggctgtggcatctctttcttccccgctgcagctgcgatttcacaatggcagccggatcatgttcaaaggaatggacaatccggcaaaattaaaatcggttcataatatttcattaatatggattgaagagtgctcagaggtgaagtatgaggggttcaaggaattaatcggacgtcttcgccatcctgagctgaagcttcatatgatctgtaccaccaatcccgtcggcacctccaattggacgtacaggcatttttttcgggacgaacgcaataaacggtttgtgctggatgacagcgaactttacgaaaagcggacaattgtgaagggagatacgtattaccatcattccaccgctaacgacaatctttttctcccagaaagctatgtgaaacagcttgacgggctcaaagaatatgatcccgacctgtaccggattgcccgcaaaggaagattcggcgtcaacgggatcagggtgctgccgcagttcgaggtactcccgcatgatcaagtaaaaaaatgtatcgcagccatcagcaagccaatctttcgtacaggtatggattttggattcgaggaatcctataatgccgtcgtccggcttgctgtagatcctgaaaaaaaatacctctacatttattgggagtattatcaaaataaaatgacagatgataggacggctgaggagctgcgtgagtttattgagacacaggaattgatcaaagccgactcggctgagccgaaaagcatccaatatttccgccagcagggctttcggatggttggagccagaaagtttcccggctccaggcttcaatataccaaaaaggtaaaacggttcaaaaaaatcttctgttcggaccgctgtgaaaatgtcatctatgagctcaagacacttacgtatgccaaagataaaaacggagctctgattgaggatgaattcacgattgacccgcatacgctttctgccatttggtatgcgcttgatgattatgaggttgctgatatgaaagagacagcacacaaacgaatccggccgaaccgagaaaggaggaggtcataaatcatgcacaatcaaacagtcagagcaactgtatttaaagccaatgccgaggctcctcagacaaagcaaatctatgaggatgacttttctgagctgtacggagaggacattatcgctccgccctacaatatcatcgagctcaaaaccattgccgaatactcgaccattcttcagcaatgcattgatgcgtacagagtgaatattacaggctttggattcgatgttgagtacacatttgatgtcaacgcaagtgatgtcgatcaggcaaaaaagaaaagagcggaaaaagactgggccagactcgaagccttttataaatgtcttcactttgatgaatcagctgaaatgattttaggctatgccatcgaagacagagaaaaaacaggcaacggatttatggaagtgcttcgcgacggggcgggaaaacctgccggcatcgaatatttagatgtgaaatatatgcgtgtatgcggagcaggcgagcctgtagaggtttcatttgtatatgaagaaaacgggaaaatgaaaaggatcaaaaggcaaaaacgcttccgaaaatatgtgcagatgatcaatggaaagaaagtattttttaaagaatacggcgatccgcgaaaaatggatattcgcacaggtgaatatgtaaacacattggcagagaagtatcaagcaaatgaagccattcacctcaaaatcggaagcggcgtatacggtgtaccccgctggatcggcaatattgtcaatttatacggggcccgaaaagcagaagagctcaattttatgtattttaagcaggggcgtcacgtccccgctgcgattacagtggaaaacgggatgctgtctgaagcttcttaccgggagctgcaggaatacatgaatgatcttgaaggcgtggagaacgcccataaatttctcctgatcgaagcggaaggaatcgcaaaagaaaaggatctccacggaggcgaggatattacgccggtttccgtggaaatcaaatccttggcggaaattctccaaaacgacgccctgtttcttgaatacgatgaaaaaagcagaaataagctgcgttccgcgttccgcctcccgccgctgtatacaggcgaggcccaggaatacaaccgggcgacagctgatactgctagaaaaattacggaggagcaggtttttcagccggagcgaaaaacgctcgtgaataaactgaacacgctgcttttgccggagctgaatatccatgacgtcaggctgacattaaaaggaccggactttcgtgatccgcttgagattgcgaaggtgctcggtccttttattacagccggagcagtctcaccgaatgatttacgtgaccttgccggacgggtgcttggaaaaacactggaggagtggccggaggacatttataaacggcctgcaggacaggatgcggaaaagacaaacctgactgcgctcatgcaggagttgaaagaaagcatcgaagatatcaaaacgtcctgaagggaggtgaatcaagcaggtggcgcgagaattaagaaatgccaaaatcagctttgtcagttatgtggacaaggcggctaaccagacagaatttttctttacgaagtcagccaaacctccgtcatttgaaaaaaaggttcggctgtttacaaaaagtgagcaggatgaacaaaagctcgtgtacggaatcgtgtatgagcctgatgttcctgatgcccacggcgattttatgaccgccgaggaaattgaaaaagcggcgcacggttttctcgcggaggcacgggagattgatatcaatcacagcttcgagggcggaaccggcgtcgtggtcgagtcctatgtggcgcccgatgattttatgatcgggtcaaagcggattacaaagggctcatgggtgctcgtgacaagagcgtcagacgaggtgtgggaacagatcaaggctggaatcatcaccggctacagcatggcgggcactgcagatgtatatgaggaagaaccggttgaaaaagcgggattcttcagtgtattcaagcaaatgcttgctgacaaaacagggaaggagactgaagaaatgagaaaagaagacatgaaagaatcattcgagcatgcgctttaccctctgctcaaacggcttgagcggattgaaaaaaacacagacacggaggaaaagccggagcagacgggtgatgacgagcgtctgaaaaagctcgttgaagacatgcttgccccgctgatcgaacgcatcgaggctttggaaaaagcgcgaggcgcgtctaagcagacagcggacgatacgggcggcaatacagagcaagtcaaaaaatcaatctggagcggactgctgtaaaaccagtcaaggaggaggaaatcaattgagaaatcaagagatcattcggaaagcggaaatgtcgctttctgctttaaaaagcggcgggcttatgaaccctgcgcaagcatcggcttttatccgcatggtgcaaaacacgccgaccattttcagtgaatcccgcgtgattcaaatggaaaatgactcgcaaaaatttgagaaaatcggcttcggccagcgtattctgcgggctgcgcaagaaggaaaagcactgtcaaacgacgagctgacagttccaacgacaagcactgtccagctgaacacgaaggaagtcattgcggaaatcaacattacgtatgacacacttgaaaacaatattgaaaaagacggcctgcagcagacgatcatgcaaattttagcagagcgcgcagcagttgatattgaagagctgatcgttaacggcgatacagcatcagctgatccgtatctggcacagctggacggcatccgcaaacaggcggtttcccatatcgttgacatgaacggtgaagaactgtccagagcgacatttaagaaaggcttaaaggcagttccgccaaaatatttgcgcatccctcaggaattcagattctatacgtctcacggcttagaagttgaatggaaggaccgcgtggcagaccgccagacaaaccttggggaccaggctgttcagggcggcttgtcaacagcattcggcgtaccggtcaaaggagtatccaatattcagccgtacacagtcggtgagggagacgcgcaatatgacgcttctgatatcattctcacacatccgaaaaatatcattctcggcttctcccgcaatatccgaattgaagtcgacaaagacatccgctcccgtaaatttattattgtcttaacggccaagctggacagcaagttcgaggaagaggatgcctgcgcaaaattaattaacgtaaaagaataatagaaacgaggtggtcagctcatgctcattgaaccgactgacgtagcctcctattcggtctatgatcgggtgaaaaacaggccggaagagctgctggcgcaggatatcatcgaggcggaagcagaagcggctctcatcacgggccaccgctttgaagacagcttgtatgatccgctgcccggcaaggtgaagttggctttagtaaagcttgcccagtattttgcgcttgtcaacagcgatgaatctgcctcatcaagctatcagtctgagaaaatgggggattattcctacacggtttccggagaaggcggcattcagcggccagaggtatatcatttgctcgaggagtttatcacgccgggctacgcccctgaatcctccagactgaaggtgaggtctttatgagctacaggcagatgctcattcatcgctgcgacatttatcatgaagcagcgcaagcgccgtctgcaggccgatttgggattccggcagacaggctgcagccggtgatttcatatccggatacacccgatgaacaagatgtcccttgttattttaccgaaaaaacgcagcagctgattcaggaggagccggatcaaactgtatatcatagctttctcgtccattttccgttgtcagcggacatccgcgtgaacgataaaatcatttgggagaatcataaatatatactaaagctgccgaaaaggatcagacatcatcattgggaggtcgtcgcagtcagggatgaaagcctatgaaaatagcgggattgaaacagctgaacacggcattaaaagaagcggcttcaggcggtttttccagacaggcgtcccggtggcttgaggagtgcgggcaagattttctggagatcgtcaaatctgaactcatcagcacacaaacgattgatacagaaaaactgctcagttcctttgagaaaggcgcagaggacaatctctggattgtgcaaagcggcgggctttcgcttgaggtggggacacagcttgattacgcctcatttcttaatgacggccattggacgtcaaaacaagatgtgagatgggtgccggggcgttttcaaggctcacggtttatttatgatccagccgcttcaacgggaatggcgctcaagagaaaatggataccgggcacgggctactgggatcatgcactgcttttatatgaacagctgtttgaaaaatcgctggaaagcaaactgcgccagtggctgaagaagctgtaaaggaggagcaggatgaacagtgaaacaggatcgatcatggcgtttttgtacagccggtggtctgttcccatttatgaacgcgagcttcctgatcactttcaggtgccgtcgttatacgtcccgccaccatctgttttcgaggaaacagatacggtctccacatttaaaaaaacctacagtctcaatgtaaaactgtttcatctggactccgttcaggcgctggatgaagcggacaggctcgcggatgccatcagagaagcgagaaatatgattccgctgctgagtgaatccggcgagaagacgggggatatggttcgcatctcccaaatcgagacaagggtaggggacaggggcgaggcggccatggtgatcaggtggagcagccgatattattatcacaaaacagaacagcctgtcttacaggatatcgacatgaacagcggggtgaaataaacggtgtcaaaggacaaacaacagaagaaggctgtacatacaaagagccgggaagctctatttgatacagcggatttgattaagcacgcgaaggaactgttcggcgttaagccggatattcttcagggggctttatttggcgtggatcaaccacgtatgacgaaatcagaagccaaccaattgattcaaacatttctaaccaaggaggtcatgtcatcatgaatggcggaacatttacaacaggcaaagaaaaagaacgtgcaggtatttattttaactttaaaacgacggcacaggagcgggtatcactcagtgaacggggaacagtcgcacttccggtcgcatcaagctggggcgaagcgaaaacgttcgtctccatttccagcgttgaagacctaaacaaaaaagtgggcctcagcattgatgacccgtctttattgctgctgcgtgaagcgaagaaaaatgcgaaaacggtattgatgtaccgtctaaccgaaggtgtccgagcgtctgctgatattgctgaaggcgtcaaagcaactgcagtatatggcggaacaaaaggaaatgacattatcatccgcatcaatcaaaatgtgctggatgctaattctttcgatgtgacaacatatatggacgaatcagaggttgataaacagactgtcaaaaaggctgaagaattaacagctaacggctatgtcacttttaccggaacaggcgatctttcttcaacgattcctctcactggatcagaaggagacactgcagctgagacgctgaatgcatccgcgggaatccgtttatctggcggtacggataaagcccctgtcaactccgactatacagatttcttagccgcggctgaaacggagagctttgatgtgattgcgctgcctgttgcagaaggtgaccagttgaaggcgacgtttgctgctttcattaaacgcctgcgcgacggccaaggacaaaaagtgcaaggcgtcacagccaattatgccggtgattatgaaggcatcatcaacgtaaccgagggtgtgctgcttgaagatggcacggaagttacaccggacaaagcaacagcttgggtagctggagcgagtgcaggagcaacctttaaccaatcactcacatttgtagagtacgaaggcgccgttgatgtgttacaccgccttgaccacgatacgattgttgaacgtctgggcaaaggtgaatttttattcacattcgacgcccgtgacaaatccgtcagcgtagaaaaggacattaactcactcgtgacgttcacagctgagaaaaacaagaaatttgcgaagaacaaaatcgttcgtgtcctggatgctgtgaataatgatttaacacgcgagctgaaagccttaattaaatcaagaaaaggcagcggaagcgatatcccggcatctgaagacggactgcagtatgtaaaaacgatgatcacgcaatacatgacaacacttcaggatgcaggcggcatcactggctttgattccgatgaagatatcacaatttcaatgaatgaagatcgtgacggcttcttgattgacctggctgtacagcctgtcgacgcagcagaaaaattctactttaatgtggaggtaaactaatatggcattaaaagcacaaaacacaatctcaggaaaagaaggccgcttatttctcgatggtgaggaaatggcgcacatcaaaacatttgaagcaaacgttgagaaaaacaaatccgaagtcaacattatgggccgccgcatgacaggccataaaacaacaggggcaaatggaacagggaccgcaacgttctacaaagtcacatcaaaattcgtgctattgatgatggactatgtcaaaaaaggcagcgacccttatttcacgctccaagctgtgctggatgatcaatcctcaggccggggcacagagcgagttacgctgtacgacgtcaactttgactctgccaaaatcgcaagccttgatgtcgattcagaagcgttagaggaagaagttccatttacattcgaagacttcgacgtccctgaaaagctatctgacacgttttaatcaaagctgaatcagcccatacgtagacctttctcagaaaggtctgttttttaaagatgaaaccaaacaatagacaagggagttttttacatgagcgagaagaacgaaaacgtatatgatctttccttttttatgccgggaaaaacaattgaagctgaggaaatcaaagtgccgatctcaaagcgttttgttgataaaaaagggaatgtcattccgtttattttaaaaccaattactactgaacggattgatgaattagagaaagaaaacaccacatttaaaaatgtgaaaggccgcggccgcgtcaaagatttagactcccagcgcttttatgcgagaattgccatcgaatctactatttatcctgattttcgttcaaaagatttaagggaagcatacaaaactgcggatccggtagaagttgccaaacgtgtattatctgttgggggagagtatgcgaactggctgaataaagcaattgaaatcaatggttttgaagatgatcttgaagatctagaagaagaagcaaaaaactagtaaaggatggcgataaggaagctgtgtatttgtactatgcaatgcatgagcttcattactcgccatcccaacttcttgaattatatgaagcaccaaaacattttaaagctcttttatttgggttgataggttataagctagatctattagaaaaagaatcaaggagaggagggaactaatatcgcaaaattaacagcccgttttgatctcgaagacaaggtatctaaaaaactaaaacggatacataaaggattccaagaggtcgaaaaaaaagtcaaaaccattaatcggcaaatcaaaatcagtatcagagcggaagatcaggcattttaccggctgagaaaaataaacgactatatcattttgaaattcgcgaaatcgcttgagattaaagttgtacttgatgaccaagtcacatcaaagcttgatgcaattgaaagaaaacttaaacggctgccgaaagaaacgaagctgactgtctctttggtagatcggacagcagctgcgtataaaaaaataaagaagatgctttctaatcaaaagctatcattccttttgattccagatgacaaggttacttctacagttaaaaggattatcggttatattaagaaaaatttgaaaaacggatacacagtaaaactaaaggtcatcgatgaaatcaccaaaacagttaatcgattaacagcccttctaaggaaatttgaaaaaacctattatgtaaaagtggttgttaagacaaaaatatcagacaaaatcaataaaaaagaaagcccgattaacaaagaaacttctaagaaagaatcagacaaatcctcagataaaggctctgataaaaactcagatcaaaaacctggatgggtcggaaaaataaaaggctggctgaaggattggtggacaaaatcagcttggccttggatcaaagatacgctcaatgaaataggcaaagcttttttggatcgtttcaaagagagattgatagaaaagctgaaaaatgatgtgtttgataagatcattgataaaattctaggaccacaaaaaaaggacgattctggtgaaaattctgacacagataaaaaagtccttaaccgtaatacaggaggaaattgttgctgtgactgctgtgaaggcggtatcagcccgggcactaaaaataaaaaaacctatagaaaaaagaaaagtcccacaaaggctccaaacagaacactcaaggttcctggagaggtgataagaagacgtcaaagcggcacacctgctgaaagtgcacctaggacctcgggttccaagttaaagaactggcttggaggcttaaaatcgctagggaaggattcatccaaactaggtaaagcgttcagaggaatgggaaaggctgttccatacgtaggatctgctttagcagtgtttgatttagctggaatcaataaagataatgctggcgaaaaggttggttcaatcggaggacgcattgccggagcggaagctggtgcaacagccggagcggaagctggtgcaacgattggatctttcgttggtccggaaggtacagcaatcggcggggcaatcggcggaattggcggcgggttagtaggcggaatcggcggcgaagaagcaggtaagaacattggtaagatgtttgatacttctaagttaaaggagagcataagcaattcactatttaacaaagagtggtggagtggaaaatggaactccatttctgatactgccaatggggctattacttggattgaagatacatggagtaaagtttcaacttggtttgaccagtatgtgtttacacctatatataatgttgctgtacctgtaattaattttatagtaggattgtttgcctatgcatgggatggcatattggcagtatggaacattgtctacccgtggtttaaggataacgtgtgggatccaataagcggagcagttactaatgttgctacaacgatatggactggattgtgcaacgcctggacggttatttcaggcatatggtctactgtttcaacatggtttatggacaatgtgtggaatcctgtaagtgaagccgtaaccactgcggcaacatggatttggagtaagatcaatgatgcatggacaataatttccaatatttggacaggagtatcgaattggttttatgataatgtatggaacccgatcgtcaaaaaagtagaagatattaaaacttcaataaaagaaaaattcgatgatgcaaggaaattttttgaggatgcatgggatggaattgaaacttggtttaatgaacatgtgaaagatccattggttaaagtatcagagaaaattgctgagaaatttcaatggctattcgatttaaaagattcagttggtggtttcgttgcaaaagtaatacacaggggggaagaagttactcacctcaagaaaaaaccaatcaaaaaggattcgaaagagaaaaaaactagttccaaaccaactactaataacatttttgctcaatctccatcaaataataatatgactgtttttcaacaagcactagatcagaacgccacaggcggctacatcaccaaaccaaccatctcgtggatcggtgaagccggcaaggaattcgttatcccggttgataacaaccgaggccgggggaagatgcttctttcacaagcggcgtctaagctgggtatgcaagttgtagacgacatgggcgcagcttcgtcttctggcggaagtccagcatctgtttcaggaggagcagctgtcagtcctctatcaggcacagcctccccagtaatgaacactgcaaatcttacaggccaagcgtccacactcggacagcaattttcagaaggctttggtaaaggcatcagcgatcagccggtcaaaatggaagactggaaaaagaaaaacatcaatacgccatttacacaaatgatttctgcttcaccaaattacggtaaacaaatggtaagtgggtatgccaagggccaaagcggcactgcaaccggaacagacggctttttgcaatcaaaagttaaaacgccgttccaagccactgtgagcaaatcgtcttcatggggcacaggaacggtcaaaggctttgcgcaaggacaaaattcaacccaaacagggactgcacagtatgtgagtacacatgttgacaaaccgttcctgcgttcaaaagacacatcgaacagctggggctccggtttgattggaaactttgtgacaggcatgaattctaaatccagtgaagtaaaacaagcagcaaaggatatggccaagagagtggagcaggctttccgtgaagaattagatatccattcaccttctcgtgtcatgatgagcttagggcgttttgcctccgttggtgttgtaaaaggtctggattctgtcgatgtgaaaaaatatgctgaaaagcaagctggatcactggcagctgcttattccggaatgggtgcagtaggtggaaatgtgaagcagtggcttatggctgcaatgatggccacaaaaacaccattaagctggcttccgggattgatgacaattgcaaagtttgaatcaggaggcaaccctaacgccattaacctgtgggatagtaacgcgaaggcaggcaatccatcccaagggctcatgcagacagtaccaaccacttttaacgcacacaaagcgccaggcatgggtaacattagaaacccgattcataacgctgctgccgcaatcggctacatcaaaagcagatacggctctattgacaatgtacctggtattaaaagcatgaagcatggcggaccttatgtcggttacgcaaacggcgggctgattacaaaagaacaaattgcacgtgtcggtgaaggaaacaagcgggaatggatcatcccagaggaacgtggcatccgaggccgctacctccttcagagagctgcgcaagctctgggaatggaagtgacagatccgtctcaatcccagcagtctgagctttcttcaggacaagtttcagcagttacatccggtacacggcaaacgatacaaacagccggaacgaaagaaataaagattgagtttaacggagaccagcatttccataatggacaagacgccgaaagccttgcagcgaaaatcaagcaggcgcttatagatgaattgcaaaaggatatcaatattggaacgaagggagtcgttgcatttgactaaatccgtatatgaattttggatttcacaagggaaggacaagttgcggctccccgttcttcccgaccagctgaatatttcaaatacgattcagaatgagacggttaaagtagccaagttcggtgaccttacatttattgacgaacaaggagcgaaagaaatttcgttctcttcgttttttccgaagaaatacagcccaatagctgaatatcaaaccttcccgtcgccggaaaatgcgataacaaaaattgaaaaatggatgaaggccaaaaaaccggttcagtttttgattacgggaactaaagtgaatttaacatgcagtattgaaggtttttcctatagcgaaggccagcaggatataggtgatcgttcctttgatattcaattaaaagaatacaaaaccgcttccccgcggaaaatcaagcagaagaaaaaaacaaaggcaaaacgtccgtcgaaggctgcgccgaagacgtacacagtgaaaaagggagacacgctatgggacattgcaggcagattttacgggaacagcacccaatggcgcaaaatttggaacgccaataaaacagcaatgatcaaacgaagcaaacggaacatcaggcagccgggccactggatttttcccggccaaaaattaaagataccgcaatgaaacaggtgatgtatgatgatagaactgttcgtcattaaagacacagagtggcttgagctggttgcagaaagcgtatcgcttgaaggccatcgttatcaggcgccgcgttctattgaagcaaccatcgtcaccaagcagggcgaccagacgtattacagtgtctcagaaggagatacggtcttgtttaaatggaagggaaaagagctgtttcggggcattgtttttgcaagaaccccggacgagcatacgcttgccttcagcgcttatgacatgcttcagtacctggtcaaaaaccaggatatgtacgtgttttccaatcagcgggccgaccagatcataagaaggattgcgagtgacttccagataccgacaacctcgatcgcaaacacaggccatacgatcaaaagtcttgtcattaaaaatgatacgacattgtatgacatcatattaaaagcgctgaaacagacgaaaagccagacaggacgacattaccagctgtattcggaaaaaggaaagctcggtctgcgcgcttggccagatccgtcagaagtatgggtgcttgaaacgggcgtcaatatcacgggctaccaatacagcacttctataaacgatactgctactcgggtggtgcttcgccggcagaaggacaataagacatataaagcctctgccaaggacagttcaggcttaaataaatacggtgtgcttcaatatacggaaacggtcacagatgacatcaaccaggcacagcttcagcagcgggcagatgtacgccttgctgaaaaaaagggcgtgaaaaaagaactgaaaaatattcaggcagtgggcattccggaagtgcagagcggcttgcccgtctatatttcgattccagaggccggcatcaagaaaacctattgggtagatacggaccggcatgaatttaaaggaacgaaacatacgatgacgatcgatgttgtcgaaaagaatacgatgccggaaggagtatcctgatgagattaagtgaggctataaaacatttggcagtcggcgcaattgacgctgagtctccggtagaactgctcccggctgaagtcgtttcggtttctcctgtggaaatcaaattaaaagaaaacagcaaactgatcataccggaagacgccatcattatcccaaaacgaatgcagtccggaggagacgatgcactcgaaccgggggatcgcctcatgaccgcggctctgactggcgggcaatcgttttttattttagataaggtatagacaaaccgcttcagtacgaaggggtttttatttagcatgtaaaaggagtgggcatcatggccctgacaccagaagtggagtttgaagatattgaagatgtgagtgaaatcattgaaacctcgcaaacgtacaaaatagattttgaaaacggaagaattacgaatgagctgattaccgggcttgaagcgatcaggcagttcgtgtatatcgccttacagacagaacgctatgcgtattccatatacagccataatgtcggaaacgagcttcaggacgtgctgaccgatcatgagacaactgatgcctataaaaagatggagatcccgaggctgatagaagaggcgctggtttatgatgaccggatatcggctgtaacagattttgagattgaaaaacaaggcgacgcgtttcatgtgtccttcgtggtggagacggatgaaggaacgcttgagattgaggaggtgattggcgaagatgtttgaagatcagacttttgaagcgattatggagcgtatgctgaacagcatttccgcagatattgacacaagagaaggcagcgtcatttataatgcgttagccccggcggcggccgagcttgcgaagtcttatatatggctggatactgtgcttgagctagttttttctgataccgcacaaggcgaatttttagacaggcgtgcagcggaagcgggaattgaaagaactgccgcgacaaaggctgtcagagcgggagagtttacatctggagttactattcctgtcggctcccgcttttacgtggataatctttattttcaatatacggcagacgggacgctcatctgtgaaacacctggtgaagcaggaaacgccaacctgaccggacgcaatttactgtcattggataccattcccggtttagaaacggccattgtcaaagaaatcctgattccggggcgcgaagaagagggagatgacagcttgcgagaacggtattttacaagggttcggcgtgaggccgtcagtgccaataaaatgcattataaagagtgggctgaggaagtggacggtgtgggaaaggcaaagatcttcccgctttggaacggtgaaggcacggtcaaaattgtcgtcaccaatgcgaatcttgagcccgcttctcctattttaattcaaaaagtgaaagattatatcgaccctgaaccaggacagggagagggacaggcgccaatcggagccgttgtcacagtggagagcgcggtctggaaagaagttgagatttctgccgaagtgctgcctgagatcaatcactcaattgatgaagtgaagtcagaaattgaggaaggcgttttaaatctctttaagaaaatggcgtttgaagataacgtcatccgcctttctcaaattaacaatatcgtctataattcaccatcagtcagtgactactccaatattcaaatcaacggcacgtctgaaaatctggtgttgagcgacgtggaaattcctaagcttgggcaggtgaagatcattgagcaaacaagatgacatgcgagcttatctgccgccgtttctcaccagccttaaagaaatggctgagctgctgaaagcggaagcgcctgagtttgataaacaaaatgacagcatatttgatctgacggatcagttattcgtgccgacggcgacatgggggctcagccgctgggaaaagattttaaacgtaccgcgggaatcaggtgacactgatgagatcagacgattgaggctcatttccaaaatgtcgaacatcccgccaatcacatacagggccattgagcaggcggtaaaccgtttcttgaaaaacccgtctgcacaggtccgcctgattcccggcgaataccgatttaacgtcgatatcaatgttgatgacctccagcacatgaatgagctgatcgaagcgatagaaaacatgaagcccgctcatttggcgtatacgctcagaggcggattgaacgagacgctgcaaatcaaagacacagttatcctgaatcatcgcagataccgaacagccagtgagctcaaggtcggttattctgtcactcttaacaataatgaggtggtcttaacttgatttcaaccatatacagagaacgcacagcggctgatctaaaaagcagaatcgatcacgtgctgctcaacggccaaaaaacagaaatagtagatctcaccattgacggtgcgaccgtcaccattctgacaaaacgtgaggaagacatcaagcatatcgaaacggtacaaatttttgacgagctgggcaatgtgatcacagagagaaagactgacctggacgtcagcgaaaacagaacacttgatttcagatttacttttgaggtggtgtaaacatggcatacgaagaaaaaacagactggcttccggacgaccccatcaacgaagatgacgtcaaccgctgggaaaaaggaataaaagacgcccacaccgacctggccgcccacaaaaacgacatgaacaacccccacaacacaacgaaggcgcaaatcgggctggggaatgtggataatgtgcagcaggcggcgaagaaggattttgacaagcatgtgaatgacggtacgattcacattactgctgctgaaaggtcaaagtggaacaacgctcagttaagtaagatatcaggtgatgatggaagggtcttttacaagagtgtgaccgaaattactgattataatgatttaaccgatactggtatgtacttaatatacaatgacggcttgaagggtccgggcctaaatcagtgttttctccttgtgatgagctataaaaacacacttgttcaaatagcttatgacggaattaagggagagcagtcattttttagaataagaaaaaacgattctacaacatggacaccatggattgaatcagaaactacagaggggtctcaaaagaaaatagatgcacatgctaataaaacagatatccacgtaacaaaatcagataaagacaagtggaacgactcacagctctttaaaataactcaggataacggtctcgcaaagtactgtgaagatgcagatttcaatactgtcatcgaaactggattctattacatgagtggtgcgacaacaacattaaatgctcctgttaataacaatggttatttaatggtttataatttcagcacgtatgcatatcaagaatacacgtcttatagcagtagtgacacaatatcaactggccgaaggaaattcatgaggaataaagtggctaactcagacgtttggacatcttggcgtgagatcgaatcggttgaaggctcacagatcaaagtagatgcacatgccaataaaacagatatccacgtaacaacatccgataaggacaaatggaataatgcacaactatatagattaacagatactcaaggttgccgaactaaaatcccagatgggactgacttgttaacactaccctctggcttttactatgcattagggaacgtcataacaaataatcctgtttcaggagatggatcatggtataactatgatgttatcgaaacagagggaggcggacgaaaaacaattttggcctctagaagttatgacggaaccttttggacggcaacgatccatacagacggcgtgtttaaaggctggaataagatcgagactgaggtaagtgctcaaaccaaagcagataaagcgctagctgatgctaaaaactatgttgactctaattatacgaataataaattaacagttcttacaggctctaatgcaatacaagacgcaagaactggggggaatgaatatcctccagggttaacactaatggatattggtcaaggaaatactacaggttatccacttggttatggaattgtaaaaaatgagaaatacagtgattttagatttactcaatatttttacggtacaggaaatgaatcaaatagttatattgatagtactggaacgtgggttcgtcactggtggagtggttccggctggactgcgtggcaaaagatatcagggtttgctcacgctaatattgggactactgggcgtcaagctcttattaaaggagaaaataacaaaattaaatataaccgtattataaaagatagccataaattgtttgatacaaaaaacaataggtttgtagccagtcatgcaggaatgcatttagtcagtgctagtttatatatagaaaatactgagcgatactccaattttgaattatatgtttatgtaaacggcacaaagtataaattaatgaatcaatttagaatgcctaccccttccaataacagtgataatgagtttaatgcaactgttactggatctgttacagttccgcttgatgcaggagattatgttgaaatttatgtttatgttggttattctggagatgtaacacgatatgttacagattcgaatggagctctcaattattttgatgttctggagcttggcggaagaaattacccgagagtttaggaggtacctttatgatcttatatgatgccattatgtacaagtatccaaacgcagtatcgagaaaggattttgaattgcgtaatgacgggaacggttcatacattgagaaatggaatctccgggcgccgttgccgactcaggcagaactcgaatcctggtgggaggaatcacaaaaaaacccgccgtacgagccgcctgatcaggtggagcttctcgctcaagaattgtcacaagaaaagctggcacgcaagcagcttgaagaactgaacaaaactttgggaagcgagttgtcagatataaagctttccatactttctttgaaaggagattactctgaatgaattattgggtgcttgccctctattatgagtgggcgacaacggatatggtgaaacaggccttagcatatcaagactgttcaattgaggatctggcagagggtgtgaacaaaaagctgatcacagctgaccagtataaagaaattaccggtaaagccatgtagtaaggcttttttattttgcctgtttttagatcaaaggaggatgaagatggtgaagtatcaatatgaatttcctctcgataaggctggaaaagccggcgctgtaaagccctatcgaggaggaaaaaatgattttgtgacacctgtttcgaatttgtcaggcgtagcggagattttaacaaatgcttccttaaaggcgactgaggcatacagtcagctcgggcaggacaggcttggcgcagttctgatttcgaaagtgaagggctgggcgtatgcagatcgtgaaggtacgctctttatagaagaaagcgacaacaacaatgtttggacaacgacagcagcagttaatgtcgcagcaggtgtcctgacagcgacggactgggtatacctttctaaacgctattaccgtttccgctatgtgaacgggaatcttcagcaatctgagtttgtattataccaatcagtcggtgcgggtgagatggatgtgcgtgtcaatggaaaaacgcctttacagattgactttgcggagaatcaaacacacgatggacggctgaaagtcgaggctcgcaaaacatttgactttgtctttcatgaaaatgcagagtccgccggcgagggtgcttctttacctgttgacggtgccgcgcatttactcgttgaagtatatggcacagcggaaatgagcgaagtcaaattttggggcaaatcggtgtcagggcagaaactgccgatcagaggcgtgaaaactgatgatgccacctctgctttgagtacattaggaaaagctgaggcatgggccttcgatattaaagggtttaaggagatcatcatggagatcgtcagtatcaccggcggtactctctcggtaaaagggaccgctgtttcataacagttttggctctcggaagggaggtgatctgcatgtgaaggaggagtgaataatgcagcaagaggcagatgtgaatgtgtttcagcaggatttagcagacatgaaaggcgagcacaaagcacttgagcagagggtttccgcattagaacgcgtgtctgaccgtcaagaccagcaaatcatgacgctgaacgaaaaattaaacaaaattgaagaaaacactacgtggattaaacgcaccatcacaggtgccatcattacagcagtgtctacaggcatcattggcggagccatcgccattatgtacagcctgctgcagcattaaagggggattttcatgaacacgtttgacaagggcacggtcatcaggacggtgcttcttttaattgctttaatcaaccagaccatgctgatgctcggcaaatcaccattggacatacaggaggagcaggtcaatcagctcgctgacgctctttattcagccggttccatcgtatttacaattggaacgacacttatcgcttggtttaaaaacaactacgtaacagaaaaagggaaaaagcagcgcgacgtgttaagggacaataatctgacgaaataaggagagatgaaaatggttaacattatccaagactttattccggttggcgcaaataaccgtccaggctacgcaatgacgccgctttacattacggtgcacaatacagcgaataccgcagtaggagcggatgctgcggcccatgcccgctatttgaaaaatcctgatacgacgacaagctggcattttacagttgatgatacagaaatttatcagcatctgcctttgaatgaaaacggctggcatgcgggagacggaaatggcagcggtaaccgggcttctatcggaattgaaatttgcgaaaatgccgatggcgattttgaaaaagcaacagcaaatgcccagtggctcatcaaaacattaatggctgaacataatatcagtctcgccaatgtcgtccctcataagtattggtcaggaaaggaatgtccgcgaaaattgttagatacgtgggattcgtttaaagcaggaattgggggaggcggcagccaaacttacgtcgtgaaacagggcgacacacttacatccatagcgagagcatttggtgttacagttgctcagctgcaagagtggaacaatatcgaagacccgaatcttattcgcgttggtcaagtattaattgtaagtgctccatcgtccgctgaagaacccgagctctatccgctccctgatggtatcattcaattgacaacaccttatacctcaggagaacacgtctttcaggtgcaacgagcacttgcggctctgtatttttaccctgataaaggcgctgttaacaacgggattgacggcgtttacggaccgaaaacagctgacgcagttgcccgttttcagtctgttaacggtctaactgctgacggtatctatgggcctgcgacgaaagcgaagatcgcagcgcaattaagctgatcacagaccataaaaatcccggagctgctccgggatttattttttcttcttcaactttttaataattccagcactgcgctccctcacccgaagcgagtacccggaaagcccaaaccttccgtaatcaacaaacttcacacgcctcaccaattttttcactgtatcacctgacattatcctctgtttgtatttattatatgtaaccctttaagaaaaggaataaggacaagagctgttttcccttgtccttttagtgtgatcatgctttttttcgtttatactcgtcaatcagccgttcgttttctttgaagattcttgctgtatgcggactgacttgatagcttgcgacactggtggttgaacgttttttcaggattttaaacggcttcgccgctctgggctcgcatctgttttgaaacgcacgttccattatccttcaccttcctcctcaattggcagcaccaaatcatatatgctcgttaatgacgtaaatagcaaataatcaaattccgtgacaatgctgtcagacgtcagcttgatgacatagttctgtgtctcgatggtaaaagggatgagaaccacttttccgtattggtcgtaataaacatcctttcgatcgagccgtgtttgtacatctgccggatcatccatatgctcggttaaccggtctttatcagcctgtgtcgaatagtggcaaagagaagccgttaagttcattttatcagcataggttttcagcagcttatcaataccttcagcataagcatctatacttccataataaacatggatcggctcgtttttcaataggtattggtatgttttcagccgattgagatacatgtggagcatttcgttgttttcttcaagaatttctcttgtgtctgtttcaagctcgctgccggccagttttttgacgtatgcacttaagaagataaaagcatcaatcaaagcaaaactgactgcgacaatgagataccgttcccagtgggtaaatagggaagtgggctcatatgtccagtataccatagcgcctagaacaaacagcaaataccaagttttccggatggcggacattttttctttgaccttcgcttcgaaacgccacgtggcatatacgtataaccccagtccggccacgatgcaccagaccatgatctgaaagaataaaaccatattcgaatccctcacatttgaaataggttctgcttattgtattcgagagatccggatggttttcctgttccatcaaaaaaaccgctcctttgacagaagcggtgtgacattaaaatatcatatttaaaataaagtaggcgatggcaccaagtgtcgctgaaatcggaagcgtgatgacccatgtaatgagcattcgcttggccgtaccccagtttacaccttttacgcggtgggacgcaccgacgccaagaattgatgaagaaatgacgtgggttgtactgaccggcaaatgaataaacgtggcgccgaaaataatggctgctccggttaagtcagcggaaacaccgtttaccggacggattttcatgatctttccgccaacggttttgatgattttccagccgccgattgatgttccgagacccatggctgtcgcgcaggcgaattgtacccaggtaggaatatcattagcagaagtatgtaaattcgctgtgatgagagccattgtgataattcccattgctttttgcgcatcgtttgttccgtgtgtatacgattgcagggcagctgttacaatctgcactctgcggaattgcttattcgttttcgccaagttgctgtctttgaaaatcagcttaacgatgctataaagaataaaaccaaggacaaaggcaataattggtgataggatcagtgcttcaatgattttaatgaagcccttatagtttaacgctgcaaatccggctgccgcaatggctgcaccggcaatagcgccgatgatggcatgggatgagctgcttgggataccgtagtaccatgtgataaggttccaggcaattgcagcgagtagcgcagccaaaatgacaacagagccattttccagcgtataaggatctacgatgtctttcgtaatggttttggcaacacctgtaaacgtcattgctccgacaaagttcatcacagccgccaatataatggcatggcgcggttttaacgcttttgttgataccgaagtcgcaattgcgtttgccgtatcatgaaacccgttgatgaaatcaaacgccagagcacaaatgactattagtatcgttaatattaatagaatatccatttttacccctcgttacgcgtttttcataatgatggtttcaagattattggcaacactttgacaagagtcggcgatttcttcaagcgtttcgtatatttcacgatattgaatgactttgattggatctgtttcatttccgaaaagattctttaatgattttctgtgcaagttgtcacagctgtgctcatactctttaattttgattgcgtgaggctgaatatcctttaagcgattttctgccagcagctcgatcgtaatcaaaatctctttcgcacattctctgatatatccgctgaatttatcaatatgctcgtctgatgaagtaattgagaaaatctccatcatggcagagaaatgttcgattccgtcaagcacatcatccaagctgtttgtcagctgaaggatatcttcgcgctcaataggagtgatgaacgctttgttaagctctttaatcatgacatgaacatgattgtcaccttttgtttcatattcctttaacgtatctgcaaattctttaagagtcgtttggttagtgaccttaaaattcacaaaatattctgcagtttcgtctatgttctttgcaatttctgttaaaaggagtgagaacttatctttttttcttcttatcattaaaaaccctccatagtttgaatgaacaatgcacacatcaaattattatatagccttttgtcgaaaaaaaacaggtaaagtcgaaaaaaacgtatcttgacttttttgataaatcgtgtctccttattttgacctacttcgctttaaaaaaacgacccaagtttgcaaaaactttctgcttaacgtaaaaagtatatcaaaagttgtgtttttcctgtcaacttttatcttctgtttcaccaaaaaacggttccctaaacaagggaaccgttttatcagcttgcttttcgttttttcatcccgtaatagacaggcagcccggcaaggccgatgaggatggataatccgcagctcattgtatctgtaatgagtgtgctgcctagcacaaagaaggagcccgcgattgccagaattggcatagatggataaagcggaacactgtaggcgcgcttttttccctttgctcgcttgcggagaataaacactgcaaaaaaggccatcacataaaaaatgtagatcatgaaaatggagatttctgagagcttatcagggttgctgatcagcatcataatcaaagccaaagcaatttgaaaagaaatcgcaatccatggtgtgcggaacgacgggtgcacatgtgacagtttttcagcaaatggaagctgtttgcgttccgccattgcaaatgaaacacgcgggaaagaaagcacctttccatttaagcacccaaagatgctgacgataatccctacactgatcagctttccgccaattgacccgaacagcatggttgccgcggtgcttgtcgcattttcaccaagcgtgacaatttcgttcgctgacaggatgtggagcaatgcaaaattaatgaaaatatagatcgctgttacaattaataatccgcccgtcatagcgcgtggcagcagcttttcgggatttttcatttctccgccgagagcggcaaggagaatccatccgtcataagcaaacaacgtagctaaaatagccgccccgaagttcatatcggaaatgctttcgtttactgctgtgaagatgtgctgatcgcctttccaaaggccaaagatgatgatgcaggcaatcggaatcagttttccgatcgttgtcagcgtttggacaaaaccgccatattttgtaccaataatattaatgacgcataaaaagagaactgctatgattccaatgacttttgatagtccagatccccagccgaaaagattcgccattaaagatccaaaatataaacccagcgcgccaataatcgccgggccgtaaatgataatctgcacccagccgcacaaaaatccccaaaactcgccgtacacttcttcaaggtacgtataaagaccgccggtttttggaatctgcgttccgatttccgcgattgtcaaaccgcccgccagtgttaaaataccgcctaacagccaggcgaaaagcgctgtttttgaatcacctgaataagcaagcacagcgccgggcttcataaaaacaccagaaccgataatggttccgatgacaagagtaagggcaaacaagaggcctatctcttttttcaaaccgttgtcttcagtatgcatgtccttaacctcctatgatgttgaagcttcatgttgaagaatctattttttcatattgtaaaccctattttagaaaagtgaaataaaataaattttctgattttcgaaatttgctttgtgtacagcaaataaaactgtaaaaacgcttgttttaacaatctataaacgaataaacttcatgatttttatttgcaaagttcgtgttttctgtattaggattttagccggtacggaggggagaattcagaaaatgaacgaaccttcggtgaagctgatatgttgactttctcatgcgaataaaatactttgttattagaacaataaatatacaactatgatatgatatctcgaaatcgagataaaataacctggagggacagcgtatgaaagttaacggcattcaccacgtatcggcattaacggccgacgcacaaaaaaacttggatttctataagaaagtattaggattaaagctcgtcaaaaaatccgtcaatcaggatgaaccgacaatgtaccatctgttctacggagatgaagtggcaaacccgggaactgagctgacgtttttcgagattccccgcattgcaccgtttcatgcgggaacaaacagtatttcttctattggattgcgcgttccaagcacagaagccctgcattactggaaagaacgttttgaagcgcagcaagtaacgcacagcggtatatccaaaagagctggacgtgacatattggcatttcaagatcatgaagggcagcgacttgtgctgactgctgatgaggaaggaaaaggatatggcctgcctgttaaacagagcggcattccggaaaaattttcgtttcgcgggttagggccggttgaactgactgtgccatatgctgaaccaactttacacgtattgacgaatattcttggatttacagaaatcagccgtgaaccagtcgaagggcaaggaaccgccgttattctggaatcaggagaaggcggtgctgcaacggaaatccatttaatagaaagaaacgatcttccgcgcgagcgtcaaggcaaagggagtgttcaccacgtcgcatttcgggtaagagatgaagaagaacttgccgggtggcaccggatcatcagccgcgaaggctttagcaattcaggcatagttgagcgctactatttcaaggcgctgtatttcagagaaccgaacggcattttgttcgagttatcaacagacggaccgggctttatggtagatgaaaatcttgatgagcttggccaaacgatcgctcttccgccatatcttgagcatcgaagagctgaaattgaagcgaaattgaaaccgatccaataaattgtgattcatttgccctccggcgcgccggagggcttttttattttgggaaaacgcatcgccgattacgatttggagaaagggctagaaaccagctgtatataggatgattggcatgaaatggcctcggcaaaaatattgtctttgtttattaatagtttattcatatttgcttgttacactatttccaagttagccaaaaggagtgaaaaacacgtggaaaagaaaaaacgcgagctggatattttcctcatcctcattttgctcgcatctgcattcttaaatatctataacatctggaatgatgatacggtgaatccttattacaccgctgcagtcacaagtatgatgcaaagctttcataattttttctatgcctcattcgacgcggcggggtttataacggttgataaaccgcctattacgttccagatacaaaccatcagcgcacttatattcggtatgcacggctggagcgtcatcctgcctcaggcacttgctggtgtaggttctgtccttttaatgtatctgttaataaaaccgacattcggtaagacagcagcaagaattgcctctttcatcatggcatgtacaccgattgctgtagctgtagcacgtacaaacaatgttgatgcattactggtatttttcttattgcttgctacatggcttctctttaaagcgatcagaaaaggaaagctgatctggctgttagcagcatttttcgttgttggagtaggatttaatacaaaaatgctgcaggcttacatgattttaccggctttcttattgttctatctgattgcggcaaacgccacaatcaagaaaaaaatcgtttcattggtaagtgcgttagccgtattagcagccgtttcgttatcgtggccgctcattgtcgacaatatccctgcaagcaagcggccttatatcggaagcagccaaaccaactctgttttggaattggctttcggctataacggaatccagcggctgacaggccaaaattcaggcggcggccagggtgcgccaaacaaagacgcttcaaaagaaatgtcttcttctgataacactcaagcaccgcctaatcagtcatcaagcaacagctcatcaagcgatggtaaatcctcaaatggcaatatggcggcgcctccatccaatggccaaatgccaagcggcggtcaaggaggccctccaagcggcggagatggcggccaaggcggacccggcggagacggagggaaaggcggtacaggaactggttcgaaaatgcaatcaggttcagggatgtttggaacgggaacacctggtccactgcggcttttccaacaagagttatctgatcaaatcagctggcttctgccatttgcgatatttggaatcgcaggcttactgatcgctggcgcgagagaaagaagaagattatctatagagcagaaggaaacggtgttctgggttgcgtggcttgtaccgattgccggattcttcagtgtcgcagaatttttccatcattattatctcatcatgctggcaccgccgattgcggctcttgtcggtgcggggtgggttgctcttgttcatctgtaccgcaatcagacaggctggaaagcatggcttttgccgggagcaattattgcgacaactggatttgaattgtttattctcagaaactacaacgatcaaatcggtgcaggctggagcatcggtgtaggtattatcggcgcattgtcagcgattgctttgctgctgtttaaacagcgccaaaaaccgttcagttattatgtttcacttgcagctctcctcgcattgctggtgatgccagtttattgggcaagtacgccacttctgtacggaggcaacagctcactgcctgaaacaggccctcagctcgcatcaatgggcggaaaaggcatgggaatgtctgatgcgactgtaaatgaaaaactgatcaaatatctagaggagaataactccggagctgaatacctatttgccacaaccgattcgaacacagcggcaccatatatcattaaaacgaaaaaagctgtcatggctattggcggatacagcggttctgacccggcgatcacactgactcaattcaaaaaacttgtaaaagaaggaaaagtgaaatacttcttggcttctggaatgggaagaggcggaaacaatgacattgttgaatgggttgagaaaaatggaaaagaagtagcatcagaaaaatggcaatcaagttctgatcaaaaaacagaaaatactgattcggctgatacatcaagcagcaaggcttcaggtgaaaacggcaaaatgggcggacctggcggaatgaatcagtcagcaacattatacgaactacatgctgataaataggaggcaaaaacatgagcagacatattcaatattcaattgttgtacctgtgtataatgaagagcttgtcattcatgaaacctatcagcgcttaaaagaggtcatggatcaaacgaaggaaaactacgagctgctttttgtcaacgatggcagtaaagaccgcagtattgagattttaagagagcacagcctgatcgatccgagagtgaaaattattgatttttcaaggaattttggacaccagatcgccattacggcgggtatggattatgcacaggggaatgcaatcgtcgtcattgacgccgatttgcaggaccctcctgaactgattttagatatgattgaaaagtggaaggaaggctatgaggtcgtgtacgccgtgcggactaaacgaaaaggggaaacctttttcaaaaaacaaaccgcggctatgttttaccggcttctcagcggtatgacagatattgatatcccgattgatacgggggattttcgtctcatggacagaaaagtctgtgatgaaatgaagagattaaaagaaaaaaatccatttgtcagagggctagtcagctgggtgggctttaaacagacagcggtcgagtatgtacgtgatgaaaggcttgccggagaaacaaagtacccgctcaagaaaatgctgaagctgtcaatggacggcatcacgacattttcacataaaccgctgaagctggcaagctatgcggggattttaatgtcaggtgctggatttctgtatatgtttatcgtgctgtatctgaagctattcacagacagcacgattaccggctggtcatcacttattgtgatccagctcctgttcagcggcattgtccttctgattttgggcgtgatcggcgaatatatcggcagaatctacgatgaagccaaagacaggccgctttacatcgtccaaaaatcgtatggaattgaaaataaaagactctatagagaccagcatatgtcataacctcaaaccccctgtccgtaatggacaggggtttttatgctctgagcccgatctaaagcaaaagatgctgatagatatatggaaattgggtaaagaagagattgtgagcttgtactgcggttcagtcatgccgaaataaaaacagcaaaacttaaagatttcgtcatcggctttgctgcatgtcagctgttatattggggggcttttaagaaacgcatgattagagccgtaccagttatgtttaatagaatactggtacccaatacaattccccacgtcaacgtcgattcagagagaagaaagctcagtaaaagaaaagccaatcctgcgcagatcatactcagtcccacggttttcatgttcatgcctcctagcaaacgatgtttctagcatctgatgtgaatgatgtcaatctgtatgatatacggatatctcgtcagaaagtttcatagagcaattaggtcttttatctaataaaaagcctcagaccgcttttacggcctgaggcattatgtcttacgaagttttctcttctttttgatccagtttaatttttttcgtcatttctttgccgtttcggagaattttcacttcaacggtatcaccgatctttgcgtctttatataagatattgcgcaattcactgcctgtatcaatttctttaccttttaggccgatgataatatcctccgcttttaatccggccttttcagcaggagagcctgaagcgacctcacggatgtaaacacctttattcagctggctgccgaacaggccgagtgtgccttcttggtaattttgcggcacttgttctagatcaagcatgctgacaccgatatatggacgttcaatttgtcctttagacagtaattcttcagcaatcggttttacgtcattgcttggaatggcaaatccgataccctcaacatcatcttcactgattttcatactgttaatgccgacgattttgccgtctgtatttaacaaaggaccgccgctgttacctggattaattgctgcgtctgtctgaatgacgttaatgctcgtttcgccggctgatgtagacattgaaaccgttctgtccacgccgcttacaattccttgtgttactgtgcgggacaggtcttttccaagcggatccccaatcgcaataacggtctcgcctgttctaagatcagatgaatcaccgaagtttgccacttttgtgacgtggtcatcactgatttggaggacggctaaatcagttaacgagtcactgcctaccagctttgcagtaacctcagtgccgtcatataaagataccttcagtgatgatgccccttctacgacgtggttatttgtaatgatataagccttgccattctcttttttgaaaatgacacctgaccctgaaccgctttctgtatcttcgctggaatcagaagaactagagccgaacaaagagctgtttgattgtgcctgaagatttgtaataccgacaatcgctggtgaaaggtcttctaccatatctgagattttagaagagtcctcgctcttgaatgcagatgagctgcttgagctttttttagattcagaggaggtgcttgttgctgtaacagattgcgtttgctgctggctggatgattgttttgcagtgtcctgagaatcatggtcgccaagcggtgtaaacgtgtaaatgccaagggcaagactgccgccgatcactccgccaagcaacggtctgaaccatccgaagcctcgttttttcttctcctgatcatgaatgacattgcgggccgagtaggaggtgctctgatcgttctctttcgttaaaaagacctcattctcattacctttcgttctgttttcatcacgatagttatccatcatgttcactccgtttctctattttcacatgtctatttatattgataggtttatgacttgagtttatcataaacaaaaactgtgggataaaaatgaaaagattatgggaaattgtgaaaaagtgcggaaaacggtacacttcatattgtatatgaaaggactgagtcgatggaacagattggattgattggatatggcagcatggcggatatgatcgccagacagctgttgaaacatgaacaaataaaagagaatgagctatttattgagacgagaacgaagggggagcggctgcgggcactcatgtcagattatccaaacgtatcggctgatccgttggagaattgggcaaatacgtgccaattgattttgatatgcgtcccgccgctccatgtcatcgaaacaatgcgccgtctgcacccgtatgtgaacagaaatactcacatcgtatccatagctgccggtgtgccgctgcgtcttttggaggcagaaacagaagccggtatctcacgtgttattcctgccattacgtccgaagcagaagctggcatctcacttgtcgttcacagtgaagcactggctgcagagaaaaaagaatatctgaatgaattgttatcggttttcagccgtgtacgagaaatcaaagaatcgaatttagatgcggccagcaatttaacgagctcggcaccaggattcatagccgcaatctttgaagaactggcactgtctgccgtcagaaacagcagcctgtccaaagaagaagcctttgattttctgattcattcgctatacggaactggcaagatgctgatcgaaaaaaatatgtctttcgaggagacgctggaacgtgttgcaaccaaaggcggaataacgggagagggagctgaggtgatacgcgcctctgtgccggacgtttttgatgaggtgtttgaaagaaccctgaaaaaatatgaactgcttacagaacaggttggtaaacagacatgaatccttgaaagaggattcttttttattactgaatggttgagattttccccagttatattgcatttttcctctttttttaatataatctgttagaatattcataatttagtaaaaaaggaggagcgttatgaaattgtacatgtcagtagatatggaaggtatttcgggtcttccggacgatacctttgtggattccggcaagcggaattatgaacgcggacggcttatcatgactgaagaagcaaactactgtattgctgaagcgtttaacagcgggtgtaccgaggtgctggtcaatgacagtcattcgaagatgaataatctgatggttgaaaagcttcaccctgaagcagacttgatttctggtgacgtcaaaccattttcaatggtggagggactggatgatacgtttacaggcgctttgtttctcggttatcatgcgagagcctcgactcccggtgtcatgtcacacagcatgattttcggcgtccgtcatttttacataaacgatcggcctgtcggtgagcttggattaaatgcatacgttgccggttattatgatgtcccggtattaatggtagccggggatgaccgggcggcgaaggaagcggaagagcttatcccgaacgtgacgacagccgcagtcaaacaaaccatttcaagatccgcagtgaagtgcttgtcccctgcgaaagccggacggctgttgacagaaaaaactgcgtttgccctgcaaaacaaggacaaagtcaagccgctcacaccgcctgacaggccagttctgagcattgaattcgccaattatggccaagcagaatgggcgaatctgatgccgggaacggaaatcaagacgggaactacaaccgttcaatttcaggcgaaggacatgcttgaagcctatcaggcgatgcttgtcatgactgagcttgcgatgcggacatcattctgctaaaggggtgttttaggctttggcgcgatacatgataaagcgtttttgggcaatggcagctacgattttggtgattaccaccctgacttttgttctcatgaaggtcattcccggatctccttttaacgaggagagaggcacaaatgaagccgttcaaaaaaatctcgaagcctactatcacttagacgatcctctcattttccaatacattttctacttaaaatccatcattacattcgatttcggaccttcaattaaaaaaccgtcggacagcgtaaatgatatgctggaacgcggatttcccgtttcctttgagcttgggatgacagcgattgtcattgctgtgatttctgggctggtgctgggcgtaatcgctgcactccgccgcaatggctttttggactacgccgcgatgagtcttgcagtactcggcatctccatcccgaattttattctggcaacattgctcattcagcaatttgctgtcaatctcaaactatttcctgctgcgacatggacgagcccgattcatatggtgcttccgaccgcagcgcttgctgtagggccaatggcgatcattgccaggctgacacggtcgagcatggtcgaagttctgacacaggattatatccgcacagcaaaagcaaaagggctttctccattcaaaattatcgtaaaacacgcactcagaaatgcactcatgcccgtcattaccgtcctgggcacactcgtcgccagcatcttaacaggaagctttgtcattgaaaaaatctttgccattccgggaatgggaaaatattttgttgaaagcattaatcagcgggactatcccgtgattatgggaacgaccgttttttacagcgtcattctgattatcatgctgtttttggtcgatttggcctacggtctcttagacccgcgcattaaactgcataagaaagggtgaagcgtgtgaatctccctgtacaaacggatgaacgccagccagaacagcacaatcaggtgcctgatgagtggtttgtcttgaatcaggaaaaaaatcgggaagccgattcggtcaagcggacgagtttgtcatacacgcaggatgcctggaggaggctgaaaaaaaataaattagcgatggccggactctttattcttttatttctttttgtcatggcagttatcgggccctttttatcgccccatagtgtcgtacgccaatcgctgacagaacaaaatcttccgccctcagccgatcattggttcggcaccgatgaactcggccgggatgtgtttacccgaacatggtatggcgcgaggatctcgttgtttgtcggcgtgatggcagcactgattgattttttgatcggtgtcatttacggaggcgttgccggctataaaggcggcagggttgacagcattatgatgcggattatcgaagtactgtacggcctgccgtacctgcttgttgtcattttgctgatggtgctcatgggaccgggactgggcacgattattgtggcgctgactgtgaccgggtgggtcggcatggcgagaattgtaagaggccaggtgcttcagattaaaaattatgaatatgtactcgcctcgaaaacctttggcgcgaaaacctttcgcatcatccgaaagaatttgctgccgaatactatgggggcgatcatcgtacaaatgacattaaccgtacctgccgccatattcgcagaatcatttttaagctttctcggcctcggcatacaggctccgtttgcaagttggggcgtgatggcgaatgacggcctgcccacgattttatctgggcattggtggcgcctgttttttccggcctttttcatatctctgacgatgtacgcgtttaatgtgctgggggacggattgcaggatgcgcttgaccctaagctgaggaggtagctgtatggaaaaagttctgtcagtccaaaatctgcacgtgtcttttacgacttacggcgggacggttcaggcggtcagaggggtgagctttgatttgtataaaggagaaacctttgcgatcgtcggcgaatccggctgcggcaaaagcgttacctcccaaagcatcatgggcctgcttccgccttattcggcgaaggtgacagacggcagcattctatttaaaaacaaagacctttgccgtctctctgacaaagaaatgagaggtataaggggagccgacatttctatgatttttcaagacccgatgacggcgttaaaccctacgctgactgtcggcgaccagctgggggaagcgctattgcgccacaaaaaaatgagcaaaaaagcggcacggaaagaggtgctttccatgctgtcattggttggtattccagatcccgaagagcgcctaaagcaatatccccaccaattcagcggcggcatgagacagcggattgtcattgcgatggcgctgatttgcgagcctgacatcttaattgcggatgaaccgaccaccgccctggatgtaaccattcaggcacagattttagagctgtttaaagagattcagagaaaaacgaatgtgtctgtcatcctgattacacatgatttaggggtcgttgcccaggtagctgacagagtcgcagtcatgtatgccgggaaaatggcggaaatcggcacgagaaaagatattttttatcagccgcagcacccttatacaaaaggactgctggcttctgtcccgcggctggatttagatggagcggagctgatcccgatcgacggaacgccgccggatttattttcgcctccgccgggctgcccgtttgccgcccgctgtccgaacaggatggttgtgtgtgacagggtgtacccgggccagacgatcagatctgactcgcacaccgtcaactgctggctgcaggatcaacgagcagagcatgcggtgctgtcaggagatgcgaaggattgaacatgaaaagggggaagaggatgaaacgagtgaaaaagctatggggcatgggtcttgcattaggactttcgtttgcgctgatggggtgcacagcaaatgaacaggccggaaaagaaggcagtcatgacaaggcaaaaaccagcggagaaaaggtgctgtatgtaaataatgaaaatgaaccgacttcattcgatccgccgatcggctttaataatgtgtcatggcagccgttaaataacatcatggaggggctgacgcgtcttggcaaagatcatgagcccgagccggcaatggcggagaaatggtctgtttcgaaagataataaaacttacacatttacgattcgggaaaatgcgaaatggacaaacggagatcctgtaacagccggagacttcgaatacgcgtggaagcggatgcttgatccgaaaaaaggcgcttcatcggcattcctaggttattttattgaaggcggcgaagcatataacagcgggaaagggaaaaaagacgatgtgaaggtgacggcaaaggatgatcgaacccttgaagttacactggaagcaccgcaaaaatattttctgagcgttgtgtccaatcctgcgtattttccggtaaatgaaaaggtcgataaagacaatccgaagtggtttgctgaggcagatacatttgtcggaaacggcccgtttaagctgacggaatggaagcatgatgacagcatcacaatggagaaaagcgacacgtattgggataaagatacagtgaagcttgataaggtgaaatgggcgatggtcagtgacagaaatacagattaccagatgtttcaatcaggggaacttgataccgcttatgtccctgctgagctgagtgatcagctgcttgatcaggataacgtcaatattgttgaccaggcgggtctctatttctatcgatttaatgtcaacatggagccattccaaaatgaaaacatcagaaaagcctttgcgatggctgtggatcaagaggaaattgtaaagtacgtcacgaaaaataatgaaaaaccggcgcgcgcctttgtatcgcctgggtttacgcagcctgacggcaaagatttccgtgaagcaggcggagacttgatcaagcctaacgaaagcaaagcgaagcagctgctagaaaagggcatgaaggaagaaaactataataagcttcctgcgatcacgcttacttacagcacaaagccggagcataaaaaggttgccgaagctattcagcaaaaattgaaaaatagccttggagtcgatgtaaagctggccaatatggaatggaacgtatttttagaggatcaaaaagcgctgaaattccaattctctcaaagctcatttttgcctgattatgcggaccctatcagttttctggaagcctttcaaacgggtaattcgatgaaccgcacaggctgggccaataaagaatacgatcagctgatcaaacaggcgaaaaatgaagccgatgaaaaaacacggttctctcttatgcatcaagctgaagagctgctcatcaatgaagcgccgatcatcccggtttatttttataatcaggttcacctgcaaaatgaacaagtaaagggaattgtccgtcaccctgtcggctatatcgacttaaaatgggcagataaaaactgatggcggtgattgaggaaatactgcttctttatgcgaaggagcggtattttttctctttcttgcacgtatacgtagggtgcagagcaaatgaaaggagtgttttcgttgaattacaagccgaaagcgttgaacaagggtgatacagtcggagtgatcgcgcccgcaagtccgccggatccaaaaaagcttgacaccgcgcttttatttttagaagagctcggtcttcaggtgaagttgggcaaggcgctgaaaaaccagcacggctatttagcgggacaggatgatgagcggctggcggatctccatgagatgttcagagacgatgaggtaaaagcagtgttgtgcgcatgcgggggttttgggacaggacgtatcgccgcgggcattgatttcagcttgatccgcaaacaccctaaaatcttttggggatacagcgatattacgtttttacatactgccattcatcaaaacacaggtcttgtcactttccatggcccgatgctcagcacggatattggccttgacgacgttcacccgctgacaaaagcgtcatataagcagctcttccaggagacggaattcacctatacagaagagctttctccgctgaccgagcttgttcctggaaaagcggaaggcgagcttgtcgggggaaatctgtctttgctgacgtctacactgggcacgccatttgaaattgatacgagaggaaagcttctgtttattgaagatattgacgaggagccttatcaaatcgaccggatgctgaatcagctgaaaatgggggggaagctgacggacgcggcgggaattctagtttgtgattttcacaattgtgtcccggtgaagcgagagaagtctctctcgcttgagcaggtgctggaagactatattatttctgcgggcaggcctgctctgagaggatttaaaatcggccactgctcgccaagtattgccgttccgatcggtgcgaaagctgctatgaatacagcagaaaaaacagccgtaatagaggcgggcgtttcagaaggggcgctgaagacatgaaaatcattcgaatcgaaacaagccgaatcgccgttccgctgacaaagccgtttaaaaccgcacttcgcactgtgtatacggctgaatcagtcatagtaaggattacttatgacagcggtgcagtcggatggggagaagcacccccgacgttagtgattacaggagacagcatggatagcattgaaagtgccatccaccatgtgttgaagccggcattgcttggaaaaagcctggcgggctatgaggccattctgcacgacatccagcatcttcttacaggaaatatgagcgcgaaggctgctgtagaaatggctctatacgacggctgggcgcagatgtgcgggctgccgctttatcaaatgcttggcggatatcgagatacgctggaaacagattatactgtcagtgtcaactcacctgaagagatggcagctgatgccgagaattatctcaaacaaggctttcaaacgctgaaaataaaggtcggaaaagatgatattgcaacagatatcgcccgtatccaggaaatcagaaaacgtgtcggatcagctgtgaaactgcgtttagacgctaatcaggggtggaggccgaaggaagcggtaactgccattcggaaaatggaggatgcgggcctaggcattgagcttgtcgagcagcctgtccataaagatgatctcgctgggcttaaaaaggtgacagatgcaacagatacgccgattatggctgatgaaagtgtttttacaccgcgccaggcgttcgaagttctgcaaacccggagcgcagacttgatcaatattaaattgatgaaagcgggcggcatcagcggagcagagaaaattaatgccatggcggaggcctgcggggtggagtgtatggtcggcagcatgatcgaaacgaagctgggcattacggccgcggcgcattttgcggcaagcaagagaaacatcacacgctttgattttgacgcgccgctgatgctgaaaacagatgtattcaatggcggcataacatatagcggcagcacgatttcgatgcctggcaaaccgggcctcggaatcatcggggctgcgcttttgaaaggggaaaaagagcaatgatgcacactgtcatatcagcagtggccaacatctggacagcgcctgattcacctcgtccgtctgatcaattcatgcttcaaccgactgtaatgatcagagactggctggagcgcatgacgtatgatgaacggcttggattatgtacagacaatgtaatccaaactcaggttctctttggcgaaaaggtacttgtgacggcggaacagggggaatgggtttctgtgatcgtgcctagccagccatcccgaaaggatccgcgcggatacccgggctggatgaaaaagtaccagctggaaaaaacaaagcccatccatacacaacacgatgtgatgatcagcaaacctgctgcctttttgtacagaagcaatggggaaaaggagatcgaattaagctttttgacagttctgccccttattgcaaaagaaaacggatattttaaggtttcgaccgtttttggggaaaggtttgtgaggcaaagtgatgcagtgcctgtcagccaacagaaagggactgctgaagacatcattcaaacgggtgcgttttttcttggccttccctacctgtggggagggatcagcgggtttgggtttgattgctccggatttatgtacagtatatttaaggcgaatggatacagcatcccccgtgatgcgggagatcaggctaaggcagggaagggtgtcccgcttgatgatatgaaagccggtgatctgctgttttttgcttatgaggaaggaaaaggagcgattcatcacgtcggtctgtatgtaggcggcgggaaaatgcttcattctccaaagacagggaagtcaatcgaaatcctcacattaacagagacaatctatgaaaaagaattatgtgcggtgcgccgctgtttttcagaataaggagggagacaaatgacgccactgcctttgttagaggtcagccagctaaaaatgcattttgacgcagggaaaaagcggacagtcaaagccgtcgacggggtcacctttcagattcgtgaaggagaaacgttcgggctagtcggggaatcagggtgcgggaaatcaaccttggggagagtgctgatgcgcctttatcagccgacagaaggaagcgtgacataccgcggcacaaatcttcatgcactgagtgaaaaagagcagtttgccttcaaccgcaaactgcagatgatttttcaggacccttatgcttcacttaacccgcgcatgaccgttcgagaaattattttggagccgatggagattcacaatctctacaatacccataaagcgcggcttctcgtcgtggacgagctgcttgaggcagttgggcttcaccccgattttggcagccgttatccgcatgaattcagcggcgggcaaaggcaaagaatcgggattgcgagagcactgtcgctgaatcctgaatttatcgtggcggacgaaccgatttctgctcttgatgtctctgttcaagcgcaggtggttaacctgctgaagcggcttcaaaaagagaaagggctaacgtttttattcattgcccatgatctttcgatggtgaagcatatcagtgacaggatcggtgttatgtacttaggacacatgatggaaattacagagagcggcaccttgtatcgtgaaccgctccatccctatacaaaggcgcttttgtcctcgattccgattccggatcccgaattggaggacaagcgtgagcgtattctcttgaaaggggagctgccgagcccagtgaatccgccgagcggctgcgtgtttcgtacccgttgtccggaggcgatgcctgaatgtggagaatctcgtccccagcttcaagaaatcgaacccggccgttttgtcgcttgccatctgtatcgaaatgctgaaacgaaggaaaaagtgagataaataaaaagagtggctcctttttactagagccactccatttgtttatacttgatgtaaaaactttacacaaaccgggtaagggacagaaaccgttgatgggaggagtgtcaatcggccggtttctttgtctctttcaaacaagacaaggttgcctgtttcttcatttgaagcaacgaggaacccttccgttgggtcaaatacaaagtcacgaggccagtttccttctgtcgacactctttctacgaaagccagctctcctgaatattgattcacttcaaatacggcgatactgtcatggccgcggtttgcgacataaacaaaacgtccgtcctgcgtgacatgaattgcgcttccctggctgttatctgtaaaatcatcagggatggcagaaacgacttggatttctctaaattcgccggctgtcgggttgtattcaagcgcaatcacttcattgcttaattctgtcatgacataagcgtatttttctttcggatgaaaagcgatatggcgaggtcctgcaccgggagcgaaggaatggcttccggattcagtcaacacaccgtctttaagcttataggtgtagagcttatctatacctaaatcaaccgctaccacataattgtgttcaggtgtgaaccccgcgtagtgtgtatgcggtttttcttgtctttcgtgcggcccttttcctgtgtgagcggcctctgaaacaggtgattgcaagctgccgtcttcctgaaccggaaaaacgtgtaccttcccgctgtgataattggcagtcaggacgaattgattttgatcatcaatgcttacgtggcatggcgaagggccatcaattaactgatgattcagaaatgtcaattcgccgctgtttttatcgatttgataggcagcaactccgccttggccgtctgctttttcgatggaataaaggatggtgttgtttttattcggcgccacatatgtcgggttgcccagcttagcggccagctttggctcgctgagtgcttttttctcagtatcaagctcaaatgaataaattccttcgcttccgccttttgtatatgttcccacatatcctatgtattttgtcatgcgatttcccccttaaaaatgatgtcacctctatattaacgtatcttgataaaataagctgttcaaaacatgaaaaaggggaagattcttcattcgcctcgaatcagcggcattgtgcagcacctgaaggagccgcctgatttaataatttctgacaggtcaatttcgataatgtgatagcctcttttcgatagctgttgattgacatggcggttgccagggagactgatgatcgtttttttttcgattgaaaggacgttggtgccaagcgtaaattgttcgtcctcgggcacctcaataagatcataacgttttgccagcatatcggctgcaactggctcaatggcctgtggataaattaacgcttcgctttcagatataatgttaaatacgcagtccaaatgcaaaaatttttcatgaagcttcactggaacgatcgtatattcaggaagtgcctcttccagctggccgatagctgaaatgtcggtgcgctggctgattccgacatagacaatgtcatcatcgataatgacgtctccgccttcaatactcgtatcaagcatgcgggtgtaagagataccttggctgtgaaaaaaatcttttataacggcttcttctccttggcgaatcggttcagtcatgcttgacagaaaggctttttctccgatgacaaatcctatgtccctagtaaaaacctgctctggtagtccgtcgcgaacgggcaaaaggacgacctcaacgttgtgtgacctaagtgcctccactaagcggctgtgctggtcgttagcggtttttacatgaatattgtcatcttcaaaatgtttttgtgtttcgtttataacatcttttatggtcatgtgctcaggtttgcataagatcactttctgaagtgtgccgtattccgttcggcataccgttttgtgctgagatttcgggatggatacgtccatttgtttttcctcctaaagtgtgaagaatacatttattattccctcatcatgaaaatcattaaaccattttaaattttagacaaatggaagagaatattgtttaataggagaatataagtgcatttagctaaaagatcagacatcaaaggggagaaaggtatggaaacaccggaaacaagattttgtaaagagtcaaaggttgtgaaaaccagcagggtgttcccgcttgacacgaacaaccataatacgctgtttggcggaaaattaatgagctacatagacgacattgcctctatttcagcggcgcgccattgcagacgtgaaacggtaacagcttcaatggattctgtagattttttaaagccgatcgggcaaaaggattctgtctgcctagagtcatatgtgacatgggtcggcacatcttccatggaagtatttgtgaaagttattaaggagcatttgatgactggcgaacgggaactcgctgccacatcctttttgacatttgtcgcattagattcaaatggcaagccggtgcctgtaccgagggttgtaccggaaacagaagaagaaatcatgctgcataatacagctgtacagcgtgctaatgaacgtaagaaccgcaagaaacacagccaggcgcttgcgaatgcgcttggaactgataagccttggtgaacgttaaacccaaaacataagttgttttgggttttttttttgtacttttcaatggtgattattgcaatggttagtccgtttttgctaggggattctataaaaaagcaacaaatgtcatgttaaattgataattttgtgacaactttattaaagattcattttagatatatcttttattcgtaagatcatgtattttaaagatatattatgaatacatcttttcgaaaggattgtttataaaatgttagataacaaaacaatcgaaattattaaaagcactgtacccgtattgcaacagcatggagaaacaatcactggccgtttttacgatcggatgtttcaagaccatccagagcttttgaacatttttaatcaaacaaaccaaaagaaaaaaacacagcgaactgcactggcaaatgccgttattgcagctgcggcaaacattgaccaattaggaaacatcattccggttgtcaaacaaatcggccacaagcaccgcagtatcggaattaagcctgagcactacccaatcgtcggtaaatatttgctgattgcgattaaagatgtattgggagacgctgcaacccctgacattatgcaggcatgggagaaagcgtacggagtcattgctgacgcgttcatcggaattgaaaaagacatgtatgaacaggcggaagagcaagccggcggctggaaagagtataagccattcgttatcgcaaaaaaagagcgggaaagcaaagaaattacatccttctatttgaaaacggaagacggcaagccgttacctgaattccaagcagggcaatatatcagcatcaaagtgcggattcctgattctgaatatacgcatatccgccagtacagcctgtctgatatgccgggaaaagactattatcgaatttccgtgaaaaaggatggtgtcgtgtcttcctacttacacgatgggctgcaggagggagattcaatagagatcagcgcaccggcaggggactttgttttagatcatgcatcacaaaaagatctcgttttgatcagtgccggagttggcattacaccaatgatcagcatgctgaaaacatctgtttccaaacagcctgaacggcaaattctgttcattcatgcggcgaaaaacagtgaatatcatgcattgcgccatgaagtagaagaagcagcaaaacattctgctgttaaaacagcatttgtgtatcgcgagccgacagaggaagaccgtgcaggtgatctgcattttcatgaaggacagattgatcagcaattcctcaaagaactgattgccaacacagatgcggattactatatttgcggttcaccgtcgtttattacggcaatgcataagcttgtatcagagctcggaacagcgccggagtctatccattacgagctattcggcccgcaattaagtttggcgcagtccgtttgaacacatacatgaaactcttctcctttcagagaagagttttttattgagatataagaaggcagacaagcgccggtttctacatccggacaatcacagacccttgccatttgtgcatacacggttttgctgttcttgcattgttttcagcaattcattgtttacctcaatcgctctaattagttgctccatccttagctccaaaccggccagcctgtcgattgtttgctgctggtagctctcgggttggggagccaaaggcagatcaaagggccaaagggtattcgacttctgatttttcatattgcgtattgcgcctccaatcggtgtcactttctattatgttatgttcaggcgatatgcacgttcgcctagacactgatgcatagagggcctgccacggggtacaataggctcaatatgaccagcggatggaggtaaagatcggtgttatggatggtatgggtatttttactgaagccagttatcgtattttcgattgcatatattttgtttcggcttgccggtaaaaaagctgtgtcacaaatgaacaattttgacctgcttttgaccttcgcaatcggaaccattatcagtgagccgatccttacatccaagctgccgatgtcaatttattatgcgggtgcttttttggtgctttatcttatcatgagcaagctctctttatctaataaatggcgatggctcctagtcgtgagcccgactgtcctaatccgaaacggggatattgatgaacgcggccttcgtaaagaaaggctgactgttaatgagctgcttggaaagctgagggaaaagggctatgccgacccggctgacattgatcttgctatcattgaagaaacgggagaagtaagcgtcatcccgaaagaggaagcgagagcggtgcaggtgcgggatttaaatatggaagctgaacggaattttatcccgattccgctcatactggatggcgaaatccttgatcataatttgaaatatctccaaaaaaaccgatcctggctgtttgagaagcttgaggaaaaagggtacagccccaaactgctgtcttcgattacccttggcacgatgaatgcacgcggtgatatatcccttgatttaaataccgctaatgaaccgcagcatgatccttacttatataaaccgggaaataacaattaagatggctctctcttgtaatgagagcttttttcttttttaaagggaatttttgtttggtgtcaaatgtacctagttaggaggggaactgaacatgaaggacttatccataagaaacgacatggcgccaacggtcagtttgctgtattccgcagtggaagaaaacagtctccgtctggcttccatcgtaagccatatgacacacagtgaactttactataaggggcgctgccaaacaaaaaacagcacggctcagcttttgcaccatatcacaaatgttgatatcagatgggtctggcgtatcaaggaaaatcggatcccggaccatattgaacaggcatacggcccgatgacagatgaaagcggacggctgcctgaaccggtgaatcagccaaacttagatgaactcctgaaaagacatcagcatgtagtagagaagctgaaatcggtatgcttcactttaactgaaaatgctttgaaccagccgctttccttcgaaggtgacaccgcgacgatacgatggggaatttggcatatggcagatcataaccgctatcatcaggcacatattgaagctctcaaaaaagaatggaagcaggatgtggcgaagtatgaacgctaaaacgaagcttgtgactgatcgaattcgtttgcgctgtatggaagatcgggatcaagccactttgtttgggctgctttttaatgatcctgacgtcatgacatattattccggtttaaaagataagaggcaaacccgcgagtgggtcaattggaaccaacgaaatgaaaaagggtacggcgttagtctgtggatcgccgaagataagcggacaggggagtttttggggcaatgcggcatcgttccccagcagatcgaaaatcaaaccgtaatggaaattggatatatgtttgcccgccgccactgggggaacggctatgcgcaagaagcagctcgggcctgtctggacatggctttaacgagcggcagttcggcaaaatgacggctttgattgatccgggtaacaaagcgtccatacgggtagcggagaaaatcggcatgcattacagcaaaacgatcagaaaatggaataaaccgatcgaggtatatgaaagaaaatcttacaattgaaagatagagctcagtttagtatcatgatatcatgtaaagttttctagggttccgcatgtcaattgacatggactggtccgagagaaaacacatacgcgtaaatagaagcgcgtatgcacacggagggaaaaaagcccgggagagtcaatctcatgtgagacgactgtccggggtttttttgttttcggagaatcctaatagatagaaaggaatgactcaaaatgaaatggggattggtcgtgcttgccgctgttttcgaggttgtttgggtgataggcttaaagcacgctgactcagccttaacatggagcggcactgccatcggcatcatattcagcttttaccttctaatgaaggcgactcacagtctgcctgttggtaccgtgtatgccgtctttaccgggctcggcacagcgggaacagtacttagtgaaatcgttgtttttcatgaaccggttggatggccgaagctattgttaattggtgtgctcttaatcggtgtaatcgggttgaagcttgtgacacaggatgagacagaggaaaaaggaggcgaggcataatgctgcactggatcagtttattgtgcgcgggctgtttagaaatggccggcgtggcccttatgaatcaatatgcgaaagaaaaaagcgtgaaatgggtgctgttgatcattgttggttttgccgcttcattttccttgctgtcgtacgcaatggaaaccattccgatgggaacggcttacgcggtctggacaggaattggcaccgccggcggggcgcttatcggcatcctcttttacaaggagcagaaagacgccaaacggatcttctttatcgcgttgattttatgctcagcagttggtttaaaaattctgtcataaattgatttttatcaaatcttcagtataatggataaatagtttagacttacaaagataagagggattattcatgaaatcatatatgactcagcggttggacgaataccgtgacggaaatgaggataaagggcggctcttggtcagctgccccgatcagccgggtatcgtctctgcagtttccgcgtttttatttgaacacggtgccaatattatagaatcaaatcaatatacgacagaccctgaaggcggccggttcttcctgagaatcgaattcaactgcgcaggcattcgtgagaaaaaaacatcacttcaggcggcgtttgcctctgtagcggataaattcgacatgacatggagcttaactttggcaagtgaattgaagcgtgtcgccatttttgtttcaaaggagcttcattgcctgcatgagctgatttgggaatggcaaaccggcaacctgatggcggagatcgctgttgtcatcagtaaccatgagggagcgagagagctggttgagcgcctgaacattccattccactatatgaaagcgaacaaagacatcagagcggaagtcgaaaagaagcagcttgaactgctggagcagtacgatgttgatgtcatcgtgctcgcacgctatatgcagattctaactcctgattttgtttcggctcatccgaatcgcatcatcaatatccaccattcattcctgccagcttttatcggtgcgaatccgtacaaacgggcctacgagcgcggcgtgaaactgatcggtgcgacatctcattatgtgacaaacgatcttgatgaagggccgatcattgaacaggatattgagcgtgtggaccaccgcgataatgcggaagcgctgaaaaacatcggaagaacaattgagcgcagcgtgcttgcccgtgctgtgaaatggcatttggaagaccgtgtcatcgttcatgaaaataaaacaatcgtctttaactagactgcaagaggcccgcgcaatgcgggctatttttgatgacaaaaaaccttgacaagtgtcttttttctttgcataatataaaaaaatcattgagcgttgaagaggattagtaagcagacctttctgtgacagagagcaaaatgaatcgctgaaacattttgccgcatgaaacctgccgaacctgccttggagtcctagggggaaaacctaggcgcataacctggcgttacaggagagcggagcgtgcacaagcgcgttcaatcaaggtggtaccacggaaacccatttcgtccttatgaatcaggatgaaatgggtttttttattgtagaagagccgcggaggagaataaatgaaaaaacaaagaatagtagtgaaaataggaagcagttcgctcacgaatagcaaaggaagcattgatgaggcaaaaatcagagagcatgttcaggcgatttccgtgttaaaaaaagcggggcatgaaatgattctgattacctcgggtgccgtagcggcggggttttccagcctcggttatccgtcccgtcccgttaccatcaaaggaaaacaggcggcggccgcggtcggacaaacactgttaatgcagcaatatatgaatcaatttaaacaatactcattaactccgggacaaatccttttaacgagaaatgatttttcgaaaagagaacggtaccgaaacgcgtatgctacgataatggaattattggaacgcggcgtcattccgattatcaacgagaacgattctacatctgttgaagaattgacattcggagataatgatatgctttctgcgttagtcagcggattgattcacgcggaccagctcatgattctcaccgacattaacggactgtatgatgccaatccaaatgaaaatcctgaggcgaaacgatttgattatttgccggagatcacgcctgaattgcttggatatgcaggttcagctggatcaaaggtcggcaccggcggaatgaaatcaaagctgttagccgcacaaaccgcgttgtctctgggagtgaaagtattcattggaactggcagcggagagcaaaaacttgcggacattttggacggcaggggagacggcacttatatcggagacaaagaactatcttcggttaacaacacaaggcagtggattcagttccactcgccgatatcgggagaaattatcattgatgcgggtgccgaggaggcgatgatccataatggaagcagccttttgcccgctggcgttgtgggcgtgaacggaagctttccgaaaggggcggtcgtggaagtcaggggaccgggcggcgtgatcggcaaaggccaaacccattactcctctgaggagattatggaggccaagggcaaacgcagtgacgaacttgattttgagaaaacgtttgaggttattcataggaatgactgggtcaatgtaaaagactaggaggcggaaaaatgagtgaagtttctgtaaaagcgaagctggcgaaagaagcagcagccgaaatgatcatgaaaacaacaaccgagaaggatgaggcgctcagcctcattgcaaacggactccgtaaagaactggattttctcttggcggagaatgcaaaagacattgagaatggaaaagagaatggtttaacaccggacatcattgaccgtctcacattggatgagaaacggatacgcgatatcgcggacgcggtggagctcttaatcgacttagcggacccaatcggcgactctcttgaaacgattgaaaaagaaaacggcctgtttattgaaaaaatccgtgtgccgctcggtgtcgtaggaatgatttatgaggcgaggccaaacgtcacagttgatgcggctaccctttgcctgaagacagggaacgcggttgtgctgcggggaagctcctcagccatccacagcaacaaagcgctcgtcagtgtcattcacagagcacttgagcaatcagcgcttccgattcacgctgtgcagctgattgaggatacgagcagagagacagcaaaagagctctttacgttaaatgatggcttagacgtattgattccgcgcggaggcaagaaactgattgatctcgttgtgagagaatcaacagttcctgtattagaaacgggagcaggaaactgccacatattcattgacgaaacagccaaaccgcaaatggcagaaaaggttgtcgtaaatgccaaaacgcagcggccttccgtatgcaacgcgattgaatcattgctgattcacaaggcatgggcaagacagcacgggaaagaattgctggcccagctggaaaacgcgggagttgaaattcgcggtgatgaacttgtatgtgaacttcacccttcaagtaaacaagcatcaaaagaagattgggaaaccgaatttttagcgcctgtcctcagcgtaaagacggttgaaaacgtccaagaagctgtgaagcatatccaacaatacggcaccaatcattcagaagcgattttaactgaaaatgacaaaaacgcggcatattttcaaacggctgtcgatgctgccgcggtctatcataacgcgtcaacccgctttaccgacggctttgaattcggctacggagccgaaatcggcatcagcacgcaaaagcttcatgcaagaggaccgatggggcttcctgcactgacttctacaaaatacatcattaaaggaactgggcaaatccgtgaatagcggggcaatgttcaatgaaaaagcttatctcattacgagataagcttttttatacgcgaaaaattgacatttcaaatttaattgtgtacaatttaattgtataaaatatatcgggggaatgaaaaatgagtcagccattatttacagcaactgtttcagcggtaggaggaagagaaggaaaggtcatttcatcagaccgcgttcttgagcttgatgtcgcaatgccggggacaccgagagccaagaaattagaaaaagcgacaaatccagagcagctgtttgcagcaggttatgcagcttgctttgacagcgccctgcagcttgtcgcaagaacagaacgggtaaaagtagagacagaggttacagcgaatgtaagtctgttaaaggatgaagcggaccagggctacaagcttggtgtgacgctgcaagtaaaaggagaaggagtcagtgcatcagaattggaggcgcttgtgaaaaaagcgcacggcgtctgcccgtactcaaaagcaacctccggaaatattgatgtgacacttgaagttgctgaataaataaaaagaggatgcctgtacaaggcatcctcaatttttttgatgaagtgtttccagcaatgtatatagagcggattttaactgtttgagatcctccccagactgctttgagagccccagaattgtctctggaatgtcaaccgctttttcttttaataacgctccgtcctctgtcaggctgatcaacacggaccgctcatcctcttcagatctttttctcgtaatcaaaccctgttgttccattcgtttaagcatcggagtgagcgtccctgaatctaaatacagctgttcgcccatttttttgacagtaagcgtttcatgttcccataacaaaagcaaagccaaatattgagggtatgttatattcagcttatcaagcagcggcttgtattgctttgtcatttcccgcgaacttgcatatagcaaaaaacatagctgattctccaatttcatatgatcaaatttattttccattttgttcaccaactcttttttgtcattcgattctattgtatctgaaaaacctcacttttcctattctcggcaaacatagcatgtttaaaaagattagaaagggaaatataacaactagatacaaataaggaggttgggaaatatggcactatttacagcaaaagtaaccgcgcgaggcggacgagcaggacatattacatcagatgacggtgttcttgattttgatattgtcatgccaaatgccaaaaaagaaggacgaaccggcacaaatccggaacagctctttgcggcagggtatgctgcatgcttcggcggcgcgctcgaacacgtagccaaagagcagaatatcgaaattgattcggagattgaagggcaggtcagcctcatgaaggatgagagcgacggcgggtttaaaatcggtgtcacacttgttgtgaacacgaaagatttagatcgggaaaaggcacaagagcttgtcaacgccgctcatgaattctgtccttactcaaaggcaaccagaggaaatgttgatgtaaaactcgaattaaaataatgaccggcatcctgagtgttctcaggatgtttttttggtgtcggagcatgcggggcgggcacagatttatgataaaacttcagagaagcgtttgaagcatgcctttaaaccaaaagttacagatgaagcgggtggctggcacggtgtctgccgtgctgaattgcgcgtatatgctgttttgtatttgcacagggcatagcggctacttggagaaataacaaggaccaggccgcgcatgcctgatccttttaatattctttcttattggcgaagttccgccatgcttgaaacggggataaatgctctgttagtgtcacttgataaaaggggatcgttctttcttcagcaggtttatcaatttctttataaatgaatgaatcatcaaacccggcttcggcagcgtctgtgtgctcagctgcatagaaaacggctttaggccgggcccagtagatggcgcccaagcacattgggcatggttcacagctcgtatacaaaatgcagtcatcaagctggtaggctcctagcaccttacaggctttccgaatagctgtgacttccgcgtgggcagtcggatcattgcttgttgtgacgttgttctgtccttctgcaataatggctccgtctttcacgataacggctccaaaaggcccgccaactcctgcattcaccccatcacgagcaagatcgacagcccgctttaagaactttttatgattcatcccaaaccctcctgtcagttgagtgttataagtatagccgaaaaaggggcaaagaacattctcaaaaaagtgcaaaataaacaaagtatttgggggatttgctaagataagaggagaaaagaggaggggtaatgatgctgcatttatatattgccaggcacggacagacccaatggaacgtggaaaaacggatgcagggctggctggattctgatttaacagaacttggactgtataacgcccgcgctcttggggagcgtctgaaggatattgaattgaatcaggtatacatcagcccgagcaagcggacagaagagacagcaaaaaccgtactgggatcgcggaggctcccgctggttaaagatcatatgttcagagaaatgtcactgggctcatgggaagggaaaaaacaagaagatattgaaagggacgaaccagatctttttcatgcttattttcattatcccgaagcttatcgccagcagggatgtgaaacgttttttgactttgaaaaccgggtaaggctggctctccaaactattttgagccttgtggaatttgatgaaaatggaacagccaaaatattaatagaaggggacgggaagcatcggaaaccgatttccgctttctaatagaaaaaaccatctgccaaagacagatggtttctattttatacaagctgtgtctgctgtgctctcgcctgttttgcggcttcaaccatgtttttcaatgcggcaaccgtttcttcctgctgtcttgttttcaatccgcagtccggatttacccagaagcggtcagtcggacagacggcaagcgcctcaacaataatgttgtacatttcttcagttgacggcacacgagggctgtgaatgtcatatacaccaaggccaagccctttcaaatacgggtggtcttttaagtaatctaaaaatcctccgtggcttctgctatgttcgattgtaatcacatcggcatcaagatcattgattgtatcaacgatatcttcgaagttgctgtagcacatatgtgtatgaatttgtgtctcgtttttcacggaagaagtggttaatctgaaagcttctgccgcccaagtcaaatactcatcccaatcgcgggttttcaatggaaggccttcacgcagcgctggttcatcgacttgaatgatttgaatgcctgcgtcttcaagcgctttaacttctttgcgaagggcaagcccgatttggaaggcgatttctttcctcgagatgtcgtttcgagggaaagaccagtttaagattgtaaccgggcccgtcagcattccttttacatgcttggaagtcaatgactgtgcgtagactgtgtctttcactgtcatcggttcaataaattcaacatctccgtaaatgactggcgggcggacacagcgtgagccgtatgattgaacccaggcatatttagtgaaggcgaaaccggccagcttttcaccgaagtattcgaccatgtctgtccgttcaaattcgccgtgaacaaggacatcaagctccaattcttcctgaatatcaatccatctttttgtttccgcattgataaagttttgatactgttcatcggaccactcagctttccgccatttttggcgtgcgctccgcacttcagcagactgcgggaagctgccgatcgttgtcgtcggcaaaagcggaaggccgagagattcattttgcagggctaaacgttcttcaaacggaatcggacgcttgaagtctttatcagttaattgctcaagctctttcttttgttcagaattggcgcctgttgcaaactgtttaagcgcctggatatcagccttagcctgctgaatctcttcgctgatcgccgcttttcctgatactaagccttctttcaaagctgttagctcggccagcttttcttttgcgtaggataatccgttcaataggtctttttccaaatgctcatcagggtgtttcgctactggaacatgcagcaggctgctggaaggctgaatccacagttcatcaacttttgcaatgctgagaatatcaagaacagcatcgagacgctcttcaaggtccgctttccaaatgttgcgtccgtcgataacgccggctgccagcactttgtctgtcgggaagccatgtgttttaagctgttccaggtttctgcctttgtcgtgaacgaaatcaaggccaattccctgaaccgggtaagagatcagctcttcataagcatcaacagaatcaaaatacgtctgcaaaagcacattcaaggatgaaagctcacttgtaatgctttcaaataattcttttgcaccgcggacatcttcactagaggcggtaacgagcgccggctcatcgatttgaacccattttacgccttcttcttcaagctctttcaaaagctgtacatataatggcacaaggcgtttttggatcgcttttgcttcagacggttcatagcctttagcaagcgtaacgaacgtataagggccgacaatcacaggctttgtttccacaccgtattcctgtttgatccggcgataatcttcgagttgtttgtttcttgtcagacggaactcaatgctctcgtcatattccggaacgatgtaatggtaatttgtattaaaccattttgtcatttcactagatacggcgtctttgattccgcgggcgatagcgaagtatgtatcggtagcgtcagtcaaatgtctgaaacgtttcgggatccagttgaagctgactgctgtgtcgagtacatggtcatactgtgtgaaatcagaaacaggcacaacatcaatctgctggtcaatttgtgtttttactgcggataaaaatagttcgtcgctttgcttcaaaaacgtatctttatcagtactgcctttccaatacgcttcaagtgcttttttccattcccggttcagtccgattctcggaaatcctaaattcgatgttttgatggttgtcattgtttctcctcctttatatgtaaaacactctctttcacccgcggatacaggctgctaagaggttttctcacaacaaaaagcctctttcccatgagagaaagaggcttttctacgtaaaacactgcctctctcatctctcagacacaatctgatggaattagcaccgtgccttatgagacatcagtctcggcgcgaaaagcagtgcgccccatttcacaatggtattacggtcggttgctgttggggtcaaaaggccaatccctcgcccaactctcgataagagaaaatgttattaattttttgaaaagttgaatcatttgttggtaatcttaacagtaattcaaattcattgtcaacatagaatttgaaatttttatttatatgatgtggtgtatattatataagaaaaataatcttatagggttaacaaatgtgattgctctgctttttctgcgagttcatcaggagctgttaaatacaggaatccattgcctgccagcgtttttgcaatatcaagaggaagtgtcctgcggattagctgtgcgaaaacctcagattcagaaagctttctttgaaatgattcttcttcatagcttttgattaaagcaagcgcaccgctgacatgaggggcagccattgaagtgccggtcagcttaccgtacttcttgttgggaagggtggataagatattttctcctggtgccacaaggtcaatctctttatttgcgttagaaaattctgataattctcgtgctactgaaacagatccaactgcaatgacttcgttataagctgcggggtaggaaagctcttctgtgcgttcgtcgccgtcaccctcatttcccgctgcacaaacgacaagcactccgtttttgactgcgtttttcactgcttcttccagctctggcacatcgcttggccctccaagggacattgagatgatgtcgactttctgttccaccgcgtagttgatgccgttaattatccattcgtattgtccgctgccgttctcgccgccaagaaccttcacaatcaataggcttgcctcaggcgcgactccggcaatgcctccgtttgaatcattagctgcaattgttccggcgacgtgtgtgccgtgtccgttgtagtcggaaattgcatcttccttgccgccgtcgtcatccgtgaagttctttccgccgatgatttgattttttaaatcagggtggcttgtgtcgcagcccgtgtctaatacagcaactttaatatttttgccttttaccccttttgcccacatttctggcgccttaatcactttaatgccctcaggaagctcgtttacatccatgatctgctcattcgtcacatacgggatcaagcggatttcaccattcataaaaaagccctccttttttatgctttcaagtggattcaagggtgttgcctcatattatatgaaaaaaacaagcgctcggacagagccatttgaagcattttgaaaaaataggatacacaccaaagaattagtaattttcaaaatattggatggcttcggcgtgtatgactgggattcaactgtaagtcaagttataatagtgttggggaaaggagcagtgtcatgaaactgaatgaaaaattatatgcatttttttcagagcatgtggaacaaatggccgaggaatggattgaaacgatggaggaaagtgatccgaattcgctttacgccctacataatgcaacagtaacggaagaattgaaagagcaggacagagaattttaccggcatctgaattacatgtatgttttaccggaaaaacaatttctcgaagagtttcaagagtgggtcattgagctgaccaacgatcaaaaacatctcgacacaccggttcagtatgtcattcgggagtttatgagaaacaggagattatatacgaagtattttgagaagttcgcagaagaaaatgagtcagcgtttgaaccgggagagaagcaaaaatgggcagatttgattgtaaaagtatttgatttcaccatttatacattcgttgatcacgctgaaatgaatgccaagcagcaattaaacgcccaaagagaaatgatattggaactaagctcacctgtcattaccctgagcaaatcaacagctctgctgccgcttgtcggtgacattgataccgaacgggcgaagtttattctggaaaacacgcttcaagcttgtgcgaaaagacgtgtggagcatctgttaatcgatctgtcaggtgttgttgtggtggatacgatggtggcgcaccagatctttaaattgattgaggcgcttaatctgatcggtgtccggtcaaccctgtcaggaatcaggcctgaaattgcgcaaactgctgtacagctggggattgacttttcgaatattaccattaaaaccaaccttgcccaagcattaaactatcatcaataaaaaaatccgctatctgtgatagcggattttttatgatgcgaaacataaagatacgagaaaggatcccgcgaataataagaggacgaggcaaaagaacacccagtcgcgccggttcacgctcaatttcctataatatgtccggtttctgcttcctgtaaaacctttcgattccatcgcaagcgctgtccgttccgcttttctgatggcgcttgccaatagcggtatggtatatcgttttaacgcactgattttcttaatgatgccgctctccgccgctcctcctctgattttatgagcctgctgaatcagctggatctcatcctttaacagcggaagaaagcgaaagcctgcaatgacaccgtacgcgagctttggtgagagcctgcactgctggacaaggctcagcataaataaaatcggatcggttgtaaaaacaaacatcatcgataaggcggaaaagcataaaatacgaaacccaagggagatgccgacagacacattatcgctgttaattgagatagggcctgcttgaaacaaaaaattattcggtgttgtcggcacctttccaaaaactgcggctgtccacacgcacccgaatgctaaaatcaaaaacggaatcgtaaacaacaaccattttttcaatgggattccggccgccagtagaacgcccgcaacgatgatgatataaaaacatgccggagtgtaagggttgtaaataaacgacagcatgacgacacaacaaaaaaccgccgccgctttcacagtcggattaatgagatgtaacggctgcttcatcacgcacctcctcttgatatgccatccattcatatagaaggggaagggtgagctttgctttttggacaagccctgtttcttgagaaaacaactgcgctggagatccgtcaaaggccaggcctgtatcgtgaagcacaagcacgctgtcagcatacgaagagactagctccatatcgtgtgtaatcataaggacagcggttccctctgtcttgatacgctgaatcatttccatgcattcagtcaccgtgcgggcatcctggccaaaggttggttcgtctaataataaaacctttacgttatgcatgagcatagtagcaacgctcagtcgccgtttttgcccttggctgatcgcaaacggatgatgatcagccaaatgcgcaagaccaaaacgctgcagcaggtgttgcgcttttttctcagtttcagcatttgctttctggccgaacagaagctcgtcatataccgtatcggtgacgaattgatgctcagggttttgaaaaacaaatcccatccgtttacgcaattctttttctttatatttctgcagcggctgatcatagagaaggattttgccgctttgcggtttcatgagacgggccagaactgataggagcgtcgattttccagttccgttcggaccgacaagcgccgttaaagagccttcgcgcaacgaaaagctgatgtctttgaaaatcgcctgctgtcctctcgcgaacgaaaggctgctgacttcaagcacactctccccaggaggggctttcttctttttggcatgcccggcaggaataggctctttgaacagcatctcttttgataaagtaaacggcatactcagcttttcctgcagatgacagacctttggaatggcgatgcccaatttctttagtgtttctgcttcatgctgaaatagatttttcgtcaggccatccagcgcttttttgcccgatttgtcgagcacgatcgttctctcaatccaaggcgcccattcatcaagctggtgctcaatgacgaggaggctgaaacctttttcccgctgaagatccttcatcagatgaacgaactcccgcgctgagaaagggtctaaaagagaggtcggctcatctaaaataataagctcaggctccatcgccaaaatacaggcgagagccactttctgcttttgtcctcctgaaagggttgagatcattttttcttttaaatgggtaatgcgtaatttttctaatacggcgttgattttctctgtcatttcttcttttggaatttgcagattttccagcccgaacgctatttcgtcctccaccgtcagcatgcagaactgctgatcaggatcctgaaaaacgaccccggcatgctgagcaatcgtttcggaggtttcagcatctgtgaccggctgttgaaatagaaagacatgtccggactgaatgccgtcgcaagcctccggatatagaccgtttaaacaaagggcgagcgagcttttaccgcatccgctcggtcctaataataatacacattctcctttttgaagctcaaacgaaatgtcttgaaaaaccggtttctcgtcttcttcataagagaagctgagctgctcaaccgtcagaagctcatcaaaggcttgcatgttctgacgcccgcttccgtttctttttcagttcctttccgagtgccattccgtttaacacacctgtataagcgagagagtcgctgacagcttttccgagaagccccgccaaaagcgcgccggaaatgaggcggatcacaagcataatgagcagataacctggtgaataggctgcatagccagaaacaaagagatcatagataaagctggctactgaagaccccataccggccagcataaggacagggagagagtatgctttccagcgtgttgcaagaaatacagcctcagccccgagcccttgaacaatgccaatgacgatgaccatcgggccagacggatttcccagcaggcactcaacgagagcggcaatgatttcagaaacgagcgcagcacccggttttcgaatcatgtacgcggcgatcacagaaacgataaaccaaatgccgtaaatcggttcataggcgattggcccaaacatacctgcaagtacgtttccgaaatgtgtaaataataaataaacaacggcaaatacgatactgataacggacatgatgacaatttcttttactttccagcttttcatgttatccctgctttctgttttttcttgatggactgttagccgaaagattcacagtcatggtgatgtggtttgtttgctgctcagccatgcggaaaacggcttccaatgtgctgaatacgtcatgcgcatccccgtcaagctcgctcgcgtaatggacaccctgtacgaaagtgccttgggcttttgcaatgtcgacagccttcataatcaatcccatataatccggctcgttcattggataaagggcaaattggcacggcgcttccgccttcaagcctcggacagcatcttcattgacacgcttatcacctttggaaagatatgtatccccctgtgtgtcacccgggcatccaatggaaaacgtgccgttcatgacgatgtgtttttcgctgtttgctgcatgaaggtaaatggcttttgcagcatcgaatacatgatcaatcgatccgcgtaacaccgtgctgatatggtcggttttcgtccataccttggatgtatctgtttttttcaacgcagacttgatcacactgataaaatcatccgtcatcggatataaagagaagcgaaaaccggcgattctgcttgtaccgcaaatatgctccattttctccgacctcctgtttttttggtaaaataaaaaactgcatatcctaagggaatatgcagtcatagatcgattaagcgcacaaaaaaatacaccattcggtcaacctgcacttccccacgctggtattatccagatcgggtcataagggatcaaagcgcgtttcttccgcgctttatctcagccaaaacagcacccctagtgctttccgtatacaattttttattttgacatcataatagatgataagaatcattttgtaaacaacgaaatcatttttttcatatagggacgggagaggatgatcaaatttggaaaaaggacacatattaattgtggaagatgaagaaaaaatcgccagggttcttcagcttgaattggaatatgaaggatacagtgtcaccatcaaacacaatggcacagaaggtctggatgcggcagcgaaaggcgggcattccttggtacttcttgatgtcatgctgccggggcttagcggactggaagtgctgcgccgcttgagaaaaacggattcgcagacaccggtcatattattaacggcgcgagacagtattcctgataaggtaacaggtctggacatcggtgcaaatgactatgtcaccaagccgtttgaaatcgaggaattgcttgcgagaatcagggcggcgctgcgactaaatggaacaaaaacggaagatatcggcacctttcttacatatgacgatttacgggtgaacgaaaaaacccgtgaagtgagacgcggagacaaagaggtggaattaacgccgcgggaatttgatttactcgtctatatgctaaagcatccgcagcaagtgctaacacgggagcaaattctaagctcggtatggggatttgattatatcggtgatacaaatgtcgtggacgtctacataagatacatcagaaaaaaactggactatccttacgaaaaacagctgatccatacgattcgcggggtcggctatgccattaaggggtaaacgatgaagctgaagacaaagattcatctatacacatcaatatcactgttgattttattaattttggttcataccgcagtctatctcattttttcgtccgcgctgacatcaaaggatgcggcccggcttgctgatgagacggataacatggccgaagcgctgcgtgcggctgaaacagaaggagtggctttgcaggatatgctgcaggcctatcttccggcaaatggcatggtgcgtgtagtgaatggtgatcaaaaagccgttatgacgatcacaaaagaaaaagcctataaagattttcctctctcttttcatagcggagaaaaggcagatgtgaggaaacatgacggcaagctgtttgccgaggctgctgttccggtgatttggaccgatggacaagtggtgtctcttcagctggttgaaaggcttgagaacacagaagagagtctgtttctgttgaaaatcatcttaatcgctgcaagtgctgctgtctgcattgcttctttttttgcaggcagcttgctactagcccgccgaatcatcaatccgatcagacgattaatgatcacaatgaaagacatacagcgagacaaagaatttaaaacgatttctttagaaggacagtccaacgatgaattgtatcaaatggggctgacatttaatgaaatggcaatgatgctgaaggagcactatgataaacagcagcaatttgttcaagatgcttcacacgaattgaaaacgccgctcaccattatagaaagctacagcagcctgatgaagcggtggggggcaaaaaagccggaggtgcttgaggagtcgatagaagccattcactcagaagcggtgcatatgaaaaaactgaccaatcagcttttggcgttggccaaaagccatcaaggactcgaggttgatctgaaaacaatcgatctgattaaagcggcgcgcgcggttatgcaaacgctccagtccgtttatcagcgtgacatattgcttgaaacagataaagagagcctgcttgtaaaggctgatgaagaacgcatcaagcagctgttgaccattttgcttgataatgcaataaagtatagtgaaaagcctattgagatgtcagctggaacgaggaatggacggccatttttatcagtgagggatgaaggcatcggaatacctgaggagcatatcccgcatttgttcgaacggttctaccgggcagatgaagcacgaaacagaaaaacaggcggaacgggtttaggcctttccattgccaagcaaatcgccgatgagcatggcattgagctgtctgtcaaaagcaagccgggacaaggaacagctgtcaccatgcaattcagcgaacagaatgggggaggccgatgactaaaacaataaaaacagtatcttttgccgcagcagccattttagttgtcatcatctgtacgtttctcatcattcggcaaacccatgagaacgtattgtcaaaggagactgtcgtaaaaaaaatcgaatcctcttatgaaggcaaggtcacgaaagcaacacaatcaaaggataaaaaaacatatgatataacgcttgaaaatcaaaagggaacttactttgtaaaagcagacgcaatatcggctgacattctttcaatgaatagagtaaaagcagtgaatccatctgccatgacagaaaaagaagccgagcatctcgcgcttgagcgggtgccgggaacggtcaaaaaacaaacacgacaaagtcgagttgccacttataccatacaaaaagaagatgggaaaacatacgaagtgaaggtagacatgcaggcaaaaacagtcttgtctgccgatcaaatcagcagcaaagatcaacaaaaaacgccgattacgaaaaaagaagccaaaacaattgctgagcgagaaacgggaggaacagcggatgacgcagatctcgaagaaagtgagggcactctcatctttgaagtggacgttgatcttcctgataataaggaagcgacagtgaaaatcaatgcctacacaggaaaggtagctaacattgtgtatgaagactgacggtttctcatcaaattctcatcttgctctcgttttcctttcatgttgagtgtgtaaactgtactcatacaaaacaaaggaggactcacaaatgctcaagaaaaaatggatggtcggtcttttagcagggtgcctagcggccggaggattcagctacaacgcgtttgccaaagaaaacaatgaaaacagacaggcttcttctaagacggatgcactcactgaacaagaagcagaagcaattgctaaaacagttgttgacggcacagtagaagacattgacagagacctttacaacggcaaagaagtctatgaagtggagattgaaaaagaaggtgaagactacgacgtttatgtagatattcgtacaaaacaagcgcttaatgacccgctaaaggagaaagcagaacaagtcgccataaccaaagaagaagctgaagaaattgctttaaagcaaacaagcggaaccgtaacagaaagtaagcttgacgaagatgacggtgcttacatctatgaaatggaaatccaaacgaagcaaggaactgagacagaatttgaaatttccgcaaaagatggacgcattatcaaacaggagatagatgactaatcaaaacccccgctgcagcgggggtttttcatgataagaaaccttcttttggacaatctaagtagaaaaggaggcgaaacgcatggaaaagaaagaggagcaatacatcaatcaggctgaatatgtccctcatccgacgaaggaaggagagtacgccttatttcttcatgaaacgtatcatttgctttctgaagatgacgagacacaaacaacagaataagggcttaggcccttgttttgttccgtaattgtgatgtaagcgcatttattacttttttgagttgacacagcttgtttttttctgtaatctcagtgtgtcaattcaattaggaacttcgttaggtgaggctcctgtatggagatacgctgctgcccaaaaatgtccaaagacgccaatgggtcaacagaaatcatcgacataaggtgatttttaatgcagctggatgcttgtcctatgccatacagtgctaaagctctacgattgaaggcgcccgcacgctttttttgccgtgcttctttcaccttcaatcccgaaggctttttttatgcctttaaaacgaaaccaatcaaaggaggtgcggagtatggattctccccattcgagtcaatctgaagaagtacccatatactatgacagcaagacaattgattacacgatgaggagacgaactgccgcaccttctggcgaggccggcacgtctccgtagaggaggtacgagtcccgatggttcaaaacatgacctatgacgaactcattttacgcatcattattttactgcgagacgggaaaatcagggatttcagaagtgttattgatgagcttcagccctatgacatggcatttatttttaaagaaatgccggaaaaacaccgcgcccgctatttatcttatttaactgtagacgatatcactgatatgatcggggagctggaacgcgaatttcagcttgtcgtcttaaataaagtcggaaaaacaaaagcaacactggcgatgaacaaaatggacaacgatgacctcgctcaattgcttgaagaaatggacgaagaactgaaggaacagcttttatccagcatggaagcgtcagagtcaaaagctgtacagctcttaatgaattacccggctgattcagcgggacgcatgatgacaaaccggtatgtgtggattcctcagcattacacggtaaaagacgcggtcgtcaaactgaaaagcttcgctgaaatagctgaatcgatcaactacttatatgttattaatgaaagcaaacagctggttggggttctttcctaccgcgatttgattctgggtgaacctgaagaaaaggtgcaggatttaatgtttacccgcgtcatatcagcagatgctcttcaggaccaggaagaagttgcccgcctgatagaacgttacgattttttggcaataccggttgtagaagaaaacaacgtgcttgtcggcattgtgacggtcgatgatattatcgacgttgttattcgggaagctgatgaggattacgaaaaatttgccgcttccggtaaagacatcacctttgacacaaaagcttacgtggcggcataccggcgcctgccatggctgattttactcttgtttatcggactgatttcaggaagcattatcagctattttgaagacgcgctgaagcaggttgtcgcgcttgcgtttttcatgccgatggtgtcagggatgacaggaaatacgggaacacaatctctcgcggttgttatcagaggtttgtctaaagaagaaatgaacaaaaaaacgattgtgcgcctgatcttccgggagttcagaacaagtatttttatcggagcggtttgttctgtgctgattgcgattgtctccatcatatggcaggggaatgcgcttttgggatttgttgtcgcctcttcactgttcttaaccttaatcatcggcacgatgtcaggaacgattatccctattattttgcacaaactgaaagtagacccggcgattgcttctggaccgctgattacaacgttaaacgatattttatctttattaatctactttggcattgccactgcattcattcactcattataaacgtaaaaagtccgtctcaactgagagccggacttttattatttaacggtttttgtaccgaaagtgagcattaagctgcccctccagcatttttttccgcacttgcggatcgttttttaacatctgttcttttttgcgcatatcctttaaaatctctgccgtctgtacgccgtcttcacgtttattggcgatatccatcagccgctctacatcagcaaaggagtattttcttgtcccccttgaagaacgctgcgggtaaatgagctttcgttcctcataatacctgatctgtcttacggacaatcctgtcaattcactcacaattccgattgaaatcacttttttgtctttataagaatgatcttctgtggtcatttttccacccctggatgtcttttgataatagtatataaaaaacaaagagaaaaaacctaacgcttgtcatattttctaacatcaaatagaagatttttgaaaaaatacggaagaaaaattaacaagaataatgcgtaacacccaagcacgttttatcctttatgtaacgaatcaaacaaggaggaaggataatcatggaggaagaaaaagcggtctcactggcaaaagaaattatagagttggatatcaagcgtgatgaaatgctggagacgtttatgcagcttgccggagaacaggcttttcaattattaagatcggttcaaaacggacaataccgaaaatcttcgtaaacataaattctttacattagattcataccacgttcatttaaaaagagtatcttttgtataggatacctcaaaatgaaggaggacgctatgagtaatttattgaaatccgctttagaaaaagaacgacgccattattctgaaaaactctatcagattggggtttataataaagaggtcatgaacaaaatgacgatttctgagcttcggaaagaatacgcttatttctttcgaagcattacaaatcataaaaattatccttatacaagataatgtataaggatttttttgcttttagaaggaatttctcgaattatagcgaatacgtatagtaagggactgaactcttattatatgtaagggttttcattatttttttataaaaatcctatatacgaggtagatatgatgagattatcgtttaacgaagaagaagttgagcgtgcgatgaatttgtacagagtttttgcaagggctttcaaaagtgtgtccgaacatagtatccgtgatagcaaagagcacggttttaatcccactgaatttgctgtactggaactcctgtacacaagaggcccgcaaaaattacagcaaattgggtcgagacttctgcttgtaagcggaaacgtcacatatgttattgacaaactagaaagaaacgggtttttagtaagggagcaggacccgaaagataaacgctctgtttacgcacatttaactgacaagggaaatgagtatttggataaaatttatccgattcatgcactgcgtattgcgagagcgttttcaggcctttcgcctgatgaacaggaccagctgatcgtcctgctcaagaaagcaggcatacacagccagcatttgctgtttcgttaactattctacactctctgtttcaggagagtgtttttttgtttcataagattctttttaaaacatcttcaatcttcctatcagacatttcgccaaggtatccattgacgtgttttttatactccttcatctgttcgttcgattgaaaaaatgccgcgatatactcttctgctttcttcatgtcccagtttctcatatctgtgacgagtttcctttcatgtagaaggtttaaattcatttcctcctgtcccggcagtgcatgataaataaataccggaagccgtttctgtaagcattcactgatggtcacgcctccgggtttagtcatgatgcctgtcgcctgttcgtacaaacggttcatctctgctttgctgtgaaggtaagaaatcgcctcgatcaaggggtggtgtaaacttttgacataggagtagagcttttcgtttctgccgcataatattttgtataagatctttccgcctggcgacagttcctgcacccattttaaaatcccaccgacccccatactgccccctgtgatgatgatggtatatggcgggtggtgctgcaaggtatctgctgattccattgcaaaatttcggtgaactggaatgccggtcaagtatatgttgttctgatcgatcccctctgatattagctgcttctttacttccgtgctcggaacaaaatggtaatcaatgttcttccgtccccataattgatttacgaaaaaatcagtgtatacattcacaaccgtcagattcggatattcaggctttaatcggttcagcagataagaaggcagcgcatgtgtgcagaaggcgatatcaggctgtttttcttggaggatgtgcctcatttgctgtgtgaacagccattcgtacatgaaatagcgtttgtcatgctggaattctccgcaggcgaggagcctgtaaatgccgctgtacgttttcgggaaatattgaatccattttaaataagccacggaggacaatttttctaaccggctatacgcatgtgaaaagatatcaatcttttcagctgccagcccttgagactctaattcagcctgcaatgcatcagccacatgatgatggccggtggaaatgcttaaaaaaggaaaaatgagaatgtttttcatgacagtcctcctaaaaaaatatggcaactatattttgaggagaacgttcacaaaatataagggtgtttttgatcataaggaaggtgaaaagatgaaaacttgtttcctttccatatggagagtggttgacccgatttatttctttttttcaaggctaagcttgattgacaacgatcaaaaaagcgtttttcgagtcaggctgacgaagtataaaggacatcatgtcgtgcttagcgatggaacgcatattagaaaaaatgatgtgctcgttaaaattcatctgcataacataaagctgatcagggagcttcaaagcattgagagcgcagtcagaaagggaatcattatttatcagaaagtatatcaatcgatgccgcttcttcttgactatatcaacaatcataaaaaaagcgagaaaatcaaaggaatcattgggattacaatgcttgacaaaggtgtggaaaggctcggctttgatgtgatcaccccggtgaatcctttttacagatgctttaaaaaagtgtcccatgtgccgattttatatttgacttcaaagcctgtgagcttgcggcatttaccgaattcatcctatttgtttatctcaaaagaaaagctgcagaaaacctatcaaaaaaaagactgatgcctcggtcagcacagtcttttttgattaaatctgatgaaatgtcacttcagggcggcttccaacacggatatttacgccggtttgtcccaagccctcgctgatataaaatggtttatcgtgatgataatgaaggcctttaatcatgttcattcgcacgagcttgcccattttcaccaaatgatacggttttggccagtgaatttgcccgccgtgaaaatgccctgacagcaggtaatcataatgaacatctttcatatccagaataatatttgggtcatgtgttaagacaagatgatagccattttccagactttgataagagccggtgatattactccgattcgtactgtaatcatcaatgccgataatattgactggccctgcagccgtctcgattcgaacatgttcattttgcagcgtgatacagccgttttcctctaaaactcgcttcaatctctgaaagtcctcttcttttaatacataatcgtggttaccgaacaccgcgtacattccatatgcaggcttcagcttttgcaaggcgttcaagtaacctgccagcttcggaatattacgtttccgatcaagaaaatccccggtaagagcaatgatgtccacaggctgatcttttgttaaatgatacagctcctcaggtgagacagaaatgttttccaagtgaagatctgataaatgaaggatatttaatttttttctggctggaaggccgtctttttggtcgattgaaatggtgttgactttcacatcttttgtattgcggttcgctttatatagaaatggcacaaatacgagtatggccaatgaaagtaagattgtaaacaaaatatatcccctcccttctatcagtatagtaagtgatcaagccctatggatagcgggaattaatgggtagagacaggttgaaaaacggattgtcatatgatgaatgatttggaagggaaaagggataataaattttgacacatgaggcagaacatgccgacggagtcagaataacaaatggatgtgtaagcaatgttacgattgatgagacaacaaaaaaaagaaacatattatctctggatcgcattatttcttcttttattgtatgtatccccgctttttattttaaaggaagatgcccatatccgggtccacgataatttagattccaacatcgcttggtacaaggttctggccgatagcggagaaatcgtcggcaaggttgacgctgccattccgcaaatcattaacgggctgccccgggatgcctttggcaccgagtggagcggaattgtttggctccatgctttcttttcttccatgaccgcctatgcaataagccagacggttacaagagttgtcgctttttttggaatgtatgtgctgctgaagaaacatataatcccggaaccaaaagcggctttcatccgaattggcgtatcgcttgcatttgccttaacaccgttctggccttcgggaatgctgagtacgcttgggtaccctttggcactgtgggcttttttaaatatccgaaaaggggatatctcatggagagagtggctgacgctgggcttgctccctctatactcaagctttgttctaggtttcttctttttcctggcagggatggcgtgtttttggctgtatgatgccattacaaaaagaagatggaatttgatgttcttaggcagtattgcatttatgacgagtatctatcttttcgttgaatatcggcttgtctattcgatgctgtttgagcacgcaccgatgcatcgtatcgaatttatctcatccaggcatgacgtttggcattctcttcggctatccgtaaaaaactttgtctatggccataatcatgtgatgaccgttcataccgttgtcatccttccgatcctgctggtcgtatttgctgctctgctgttcaaacgaaatcggacaaagccagaaaatgtgtatctgtttttatgtgtgcttaattacggattgtcattatggtatgcgttttggttcaacaaaatttgggctgttccaaagcagaaatttgcctttttagcagaatttaattttgcccgttttcattttcttcggccgcttgttatatacgtgagctttgcgcttgctttatatctcatttggcggatggggaaaggatggaaatggcttgtgtacgccgcagtcgctgcacagctgatggtgttggcgccttttaatgaagaatatacgtatggcgttcattacaacgcgccgacattcaaggagttttatgcatcggagcaattcaaagagattaaggaatatatcggacgtccgcaggattcgtacagggtggcgagcatcggactgcatccgtctattgcccaatataacgggttttatacgttagatacgtataacaatctgtatccgctttcatataaatatgaatttaggaaaatcatcgaaaaagagctggaaaaaaattctcggctgaaacaatactttgatgaatggggcagccgctgctacctttttgtcgatgaactcggtaaacgatatgatttcaaaaagaactcgaagaaaacgatcaacaaccttcaattaaatacagatgtatttaaaaaaatgggcggacggtacattttttcttctgttccgatcatgaatgctgaacaaaaccatctcgcgctcgtaaagacgtttgaccataaagattccgcctggcgcatttatttatatgaaacaagataaggaggatatcgattgaaacagtcacagccagtattaaccatcgtcgtcccgtgtttcaatgaagaggaagtgtttcaagaaacaagccgtcagctgacagaggttgtagatgatttaattgaagaaaaattaattgctgaagacagtaaaattctgtttgtcgatgatggcagcaaagaccgcacttgggctttgattgctatggagagcataagaaacaagaaggttaccggcttaaaattagcctgcaatgtcggccaccaaaaagcgcttttagccggactgcataaagcgaagaataggtcagactgcgtcatttcaatcgatgctgatcttcaggacgacatctctgtgatccgggattttatgctgaaatatcatgagggctgcgagatcgtttacggtgtacgccggagcagaaaaaccgatacctttttcaagcgcacgaccgcgttagggttttatcgtctcatgaataagcttgggattaaattaatttataatcatgctgattttcgtttaatgaataaaaggtccctcgaagagcttgagcgttatccggaagcgaatctgtttttaagaggtattgtccccatgatcggctttaaatcggccgaagttttgtatgaccgcaaggaacgctttgccggcaaaacgaaatatccgctgaaaaagatgctatccttcgcttttaacgggattacttcattcagtgtcgcaccaattcgattctttacgcttttagggtttgttttgtttttcctcagcgctgtggcagggattggcgcgtttattcaaaagctgctcggccatacgaatgcaggctgggcgtctcttatcatatccatttggtttttgggcgggctgcaattgatgggaattggaatcatcggagagtatattggaacaattttttctgaagtgaaaagacggccgaaatacgcgatcgatattgatttgtataatgaacagctgagcccgcttcagcgccaggaaaaagagcggttagaaaaaaagtacagttaaacacggaaagagctgacttcattagtcagctctttttcttcaactgatgcaatatagcgctaagcggttcgtcttgcgggttgcggtaaaaatcaaaaaatgggcagccctgcttcttaattcgatcgatgaccgtatcaattgtaaaaagagcgggtgttaaagatgattgcacctcatgccagtagagcggggctgcaacagtcccaagctcatttcctctcgtcgaatagggacagataatcgtttttccttctgcatgctgcaaataatcaagatacaatttgccgtgtctgtttttaatcaagcgttcagtggtaaagagctcgggaaatgcattggtgcagtactctgcgatcagctgcgtaaattggcgtgtttcttcatacgtaaatgcctcgggagacaagggaatataaagctggattcctttgttgccggacagcttcgggtacgatgtgatgccaaaggaatccaacagccgcttcagttcatttgcggcctgcacggccataagaaagtcatctcgcgaaggcgggtctaaatcaatgacaatctcagccggacgcctgcttttaatggtttgaaaaggaacgtgaaactccaaagcaagctggttgcaaagccatagcaatgtagacatatcctcacagacaatatgttcatggcttccatcatagaaggactgaacaaaatccggcgcatagtccggcttgtttttttggaaaaatgattcgctcctagatccatgcggatagcggatgacggtgacagcccggtttttcagaaatgggagcaggtagtcactgacttcaatcatatactgaataaaatcttcttttgtttttttattcttttcaaatatgattttatccaggcttgtgaactggagttttgggtgaaccggtttggagtgtcgtatgacttgcgcatacgtgcattcggtccagtccatttggaattcgaaaccgataaacgatacctctcttaatgtgccatggagaattgttaagtattgaacagctgcacaaatcgaaggttcaagcttaaactcgcctgagggtgtttgatgtccgtgctgttccataatctcgcgtatagcgcttttttcctcatcgcgcattccgtgcgagacagaggcaatcggtgtcattattccgttttttaacaccgataccgtcagaaacccgttgttagggttgaaccctgttatgcaaacataagcttgtttaaagtttttatatttgagccaatcggacgaccgcttcttttcaagccatttgctgtttgttttcttcgctacaattccttctccgtcatattttattaccatctcccagagttgatcaaaatgatcataacagggaatggattgaatggtttcttttgcgtaaggatctggagatgcaggaagctttgctgcggatatgagttcacgcagcgattttttgcggtccaaatacgaaagaagcgttacatcttctccgcttcgctctaacaaatcaaaggcgagaaagcagcacgaccgcgcgtttgccgattcctgaatcttgtctggccttttcaaacgcccccgcacttgaaggtgttcaaaatctgcacgacagggattcaccaaacatacgatttcaccgtcaagtgtcagcggaagctctttttctaggtgctgaaaggcagttttggcgaattgtatgatttcagggaaggtgctgctgagctccacaccatttctgctggttaaggtcacacctgaagaatggatgcggagaatacagcggtacccatcatattttacttcgtaacgccattctgctccgattggcggtgacgaagttaagaccggctgcatggtaaacgccatgcgctatgatgtgccggaggctttttttctagttgttttttgttttttatctccggctcctttcggttcagcggcttgtgcaggtgcggcagccggtgtctcccggttcggccttctggttctgtcgatgctggcttgcagagcgcttaccaggtcaatgacatcttcacgaggtggcgctttatcaggagtgacagccgtttctttattttctagcttgtcgttgactctttgcagcagcgcctgtcggtacgtgtcttcatatttctcaggctcaaacttagcagtcagttcatctattaatgtgatagcagtttgcagttccttatcgtttacattcgattgatcatgtacacctgggacttgagcggcgcttctgacctcatcgggataatggatagactccatgacgatacaattttcataaacgcggagaatcgccagctgctgctttgacctgattgtcatattggcgataccgatctttccggttgagcgcagcgcctcacgcagcagggtataggccttcgtcccattatccccggggccgacaaagtaggagcggttaaaataaatcggatcaatttcctgaagctgaacaaagtcaacaatctcaactgctttctcctcatgctcctgttttaagctttttaaatcttcgtctgtcagcactacatattttccttttacatattcatatcccttcacaatttcatcaggactaagagttttttcgcaatttgtgcaaactttctcgtatttgattggtgcgtgatcctctttatggaggctgcgcagtttaatatctttatcttctgtggccgcatatagcttgatggggatgtttactaatccgaagctgatcgatcccttccacattgtatgcatatcgataaacccctttttttctttagtgtgaagagaaggagtacgattcatgtgtagtaacttatgggtgaaaaaaagccggcgctgttattgcgacggctgttcaataatgaattgttcgaattgttccggaggtattggcctgctgaaaaagaagccctgcaaatggtcgcagcctttttcaaaaagaagctgcttttgagctgcattttccacaccttcggcaatcacctgcaaagacagctgatgccccatggcaataatagctccggtaatttgctctgatttaggatgggtctgaatatcgtcaataaatgatttgtcaatcttcagcctgtgaatcgggaagtccttcaaatagctaagagagctgtgaccagtaccgaaatcgtcaatactgattctgattcctaattctgttagggatgacaaaacctttttggagtgatcgagattgtccattgtcatgctttccgtcacctccacttcaagaagctgcggaggaagctggtatttattaagcgtatccttgatgaggggaatcagatctttagattgaaactgtctggcggaaatattaatggcgacagaaagatcatagcctttgtcatgccaaatccttgcctgcttgcatgcttcatctataatccactttccgatatcaataataagtcccgtttcttctgcaacaccgatgaattctccgggcggacgcagttgcccgtctggtgtcacaaggcgtatcagtgcttctgctcctgtcattttttgttttttcacactgaattgcggctgataatgcaagacaaatctatcgttttcgattgcttctctgagtaccatctcttggttaagcttaacggtttctttgttgccgattgaaaaagaatagtatctgtatttgcttttgtttcgttctttagccgcatacatcgccatatcagcctttttcatcaattcaaggccatccgtcccgtcttttggagatatcgcaatcccgatactgacagatgtgacaagggtgtgatcttgaattttgaaaggttttttgaatttttggataatttttcttgctaaaacatctgcttcgcctgttcctgtattggcgtctgttaatataataataaattcatcaccgccaagacgggcgataaatccgttatcagggactacagatgacaggcgtttagctgcaaactgaagcaattgatcaccgacattatgccctaatgcatcgttaatcactttaaaccggtttaagtcaagaaagaatacaacagtgttataatgcaaggaatgctcgcgattcagcacctttgttagatgagagatggcatgccttctgttaggtaagtctgtaagcgaatcataatgagccattctatggatttctttttctgctttgtactgcttcgtcatgtctttacaaatgacataaatgctgtctagttcctgattgacctcaacaggtataagcgtaatatttaagtgaaactggcctttttcagtgataagatcgctatcgctgttcatcgcttgtttatcttttttaacttgctcaaaaaggcgcttaaccttcagtgatgtgtaattcctccagtcatgcatgctgaagccaaatttgctgatcatttcctcaccagcgtgattggaagatattatgtctccttctaatgataaaataaaaattgcatcaatattgtggacgattaaagactgaaatcgctgttcgttatcctttatgcgttcgctctgtttaataaactttcgatctgcatgggaactgaataacaataacgtttggatacaaaaaataattaaagtaacaaaaattgaccaatgaaacgtttgcacctccatatggcttccgggcggagccatgtccttatggaaagttgccgcaagcatccctgtgtagtgcatgcccgaaatcccaatgcccattacaattgaactgacgactttatagaatataagatgctcagaatgtttttttacggccaagtcaaagaatatttttaacgagacgaaagaggctgcaatcgcaatgataattgaaactgtaaataaaatcggttcgtaaataatcattacccgggaaatggcagacattccgatatagtgcatagaagcaatagatgcgccaagcacaactgatccggtaagcagtctgtaatatgtaagaatgtgccggctgacaaaatataatgacacaaatgatcccgaaacagatgcgccaatggctgccattaaaggcatgaattcatattccatcggcatttccatatggacggccatcatccctacaaaatgcattgaccaaataccgaatcccataataagtgagccgccgatcagccaaattttactttttaagcctgtattgatggtgactttccttgaaagttcaagggaaatatacgaggcggtacaggcaattagaatagataaacatatgagagtcgtattatatgtaacgtgtatttccaaatggagattccccccgtatcgtgtgttccagtcttgttgactctctttattatcggctgcttaaccgcagagtttcagccttcaaaacgatagaaatacgagggagatctatttttagttcaactgaccgtgaaaaatgtgttaaaatcatcttgacgttttccgaaaaaacaaaaatgtataatacataaacatgaaacaagggagttggtggctatcgaagagctggttatgtcatggatagaagcatttaaaagcttatcttattttggaatatttctagcgctcagtattgagtttatcccggccgaagtcgtcttgccgcttgcgggctattgggtatctaaaggcgatatgacacttgccggcgttgttttggcaggatcgcttggaggagtggccggtccgcttacgctgtattggataggccggtacggaggaaggccgtttcttgaacgttttgggaagtatctctttattaaacctgaagcgcttgataagtcagataaatttttcaaaaaacatggtggctttgtcgcgttcagcggccgtttcttgcctggcatcaggacattgatttccataccgtgcggaattgcaaaaatgaatgtttgggtgttttcgctttatacattcattgctatgcttccgattacatttgtatatgtttatctcggtgtgaagctcggtgaaaattggaaggaagtcggctctattcttgatcaatatatgcttccgatcgggatagccattttggcgcttttcctgctctacttactgatgaaaaagaggaagaaacgcacgcactccgaacaattatctgtatttttgaaaaataaacgttgacaaatcattgcgctgcgcatatcattgacgtataaaatcatatttcttgaaatcccaaaggggagtagcgtccggaatgtattccggaaacaaagtcgtcatttcatggattgtatccatcggctttgttggcatgcctgaattcatgtctagcaagacctttgccttatgtcggcaaaggtcttttttgcatggtccggccggcataagatcggatgaagagaaagaaaacaacttttttgggagggtatcatttatggatgcagcattattattagagtatggttgggttcttctcgtcttgatcgggctggaagggattttagccgccgataacgcgctggttatggcggtaatggtaaaacatttgccggaggaaaaaagaaaaaaagcgttattttatggattggcaggggcttttgttctgcgatttggctctttatttgcaatttctttcttggtcaacgtatggcaggttcaagcgattggcgcgatctatttgctgtatatctcagcaagccacttattgaaaagatatgtatttaagaaagaagacacacataaagagacgaagcaaagcggtttttggccgactgttttaaaagttgagctggcagatatcgcgtttgctgttgattccatcttagcagcagtagcgctggcggttacacttcctgggacatcactcccgaagatcggcggacttgacggaggacaatttctcgtcattttggccggcggtatcatcggactggtgatcatgcggtttgcggcttccatgtttgtgaagttattaaaggaacgtccaagcctagaaacagcagcctttgtgattgtcggctgggtcggagtgaagcttgctttatatacgcttgcccatcgcgacatagcggttgtttctgagcactttattcattctggaacatggaagctgatattctggggtgtcttagcagcaatcgcggtttgcggctggtttatgtcaggtgggaaaaaacagccggagggcgcacaaaacgaacaaagaaacagcacccgtgaacgggcgtaatctgaaagactctgcttaaaagcagagtctttttgtgtttgaagcgttttcataagcgaaataaaataacatttttataacatctttgttacaaaaaacacgcataaaacccccttaattctttagaaaggcacgaaatcatgtataggacgtcagaatggtttgtcataattgagacattggaaatcaatatttctttttctcctttgcgaatccctatcaaattagctatcattaatgagtagttatagggaggaactgaggtgaaaccagtgcttagccttttgtttaaattgggaaaaaagaagcaaacacttgaaaaagctgttgagagtatacaaaaaggcaataaagatctgcaaaatgaattaatacagcaatataagccatttatcgcaaagacggtttcatccgtttgtaaacgatatatagatgaaaaagacgatgagttcagtattggactgatcgcgtttaatgaagctatagaaaaatattcacctgaaaaaggaaattctctgctcgcatttgctgagcttattataaaaagaaaagtcattgattacattagaaaagaagccagaagcgcacaaaatataaatatcgatttacaggaaggagacgatcaggagtcatcacaaagcctgattgaagccgagctttccattgatgaataccgccgtcagattgaacaggagcagaggcgggaggaaatcctctattttcaaaagcagctcaaggattatggtttatcgtttaaagaactgcttgaaaattctccaaagcacacggatgcaaggcaaaacgccataaaggtggcaatgacgcttgttgaacatgaagaattggccgctatcctgtatacaaagaagcagcttccggtcaaacagcttgaacagcttgtctctgtaagccgaaaaacgattgagagaaacagaaaatatattattgcgatgtgtattatcattacgggtgattatatttatttaaaagattatcttaaaggggtgctgcactcatgagaagagggattatagtagagaaaaataaaaaattcgtcacgttgctgacccctgacggacaatttttaaaagccaaaaatgatcgacacagctatgaaatcggagaagaaatcatgcttccgagtgaaacacgcatgggcagaagggccagcttttttgatttttttaaactgcgccctttcaaaatggggatttttacgatgactgctattatgctctttatttttatagttctccccgttttttctaataataaggcctatgcgtatatgacaatcgatatcaatccaagcgtcgaaatggcgttaaacagcgattatgaagtgattgaactgacgcctctaaacgatgagggacagaaagtcgtgaatgatatagatgattgggagaagactgattttaaaaaggtgattgacgatattataaccgactgcagtgaacacgggtatgtaaaaaaatcgaaagaaatattgatttccactgtttatgaaaacacagaagacaatacatataaaaaggctgtgaaaaaacagctgaatgatgtgactgaaaaatataaaacgacataccgcatggaatctctcgagtcagatatgcaaacgagggaaaaagcgaagaaagaaggcgtctcaacaggcagctacatcaaatcaaatgaaaagaatgacaataaagatataaaagatgactccagcaaaccatccggggaagaggatcaaaagagtgatgaaaatgaggatgaaaacaccgatcaaactgacacccaggacagcaagcaaggagataatgaacagctgaatgatgcggattccggagaccagaaagaagagaaagcggatgaccagattgatgatagtgacaaagataaaaaaataaaggaatcagatgaaaacacaaataccgaaaaagatggggaccatgagcaaaccccaatacaagatcctcaagataaaggaaatgaaaataacggcgttgacaagggccaaagccaatatcacagggactggaacaatggtgaacaaggcaagaaccgttcttcgtccagaagggataacgcttcagaccgacgtaatccaaacggctacagcagtgataatcattcagctaaaaatgaagattcgccgagtgcccccggcgaataaagacctgaatttatttagttgtgccatttaattgtgattgtgcttgctgtaccagccgctttgtcatttctccgcctacagagccgttagcgcgtgcgactgtatcagaaccaaggttcacaccgaattcttgagccacttcgagtttaaattggtcaagtgcctgctccacccctggaacaacgagtttatttctgctcgccatctttttcatctcctttttcgataaagaaattcttaacgcgtatttagtttgaaatatacggggtttatttatgctggcaattgttgtggagaaaaataaaaccccggcctctgagccggggtggcgcagactatagaatgtctgctgtcattttatgtgcggttgcctgaatatggaatgtcaaaatggagaggactgtaatggcgataatctgtctgattttaagccattggctgtcattcagttcttcaaaacggtgacggagacgctctgtctcctgttcggcgatctcctgcagatttgattctttcatagaaggagtatcttggtgatggatggcatcaagcacatatgcgcagctttcataataagcaatcgggctgatgacatcatcagatctgtctgagattgtgttaaaggccacttttaaaatagctcgtatgtgttcaaagtcataaatggattttaaatcacgtacaattaaaagaataactgcctgttcaattgagtattttttgcctagctcagggtgtccgatcagatctttgatatcacgctttacccagttttgaatcgcggttgactttaacgaagtcagctcgcataagttgccaagctctacgatttcatttgtagacagtccgtattcttttttctgtttttttcgttcatatcttgtaagaaattcaggaatttctagatgattggctgctttttctgctgacatgttcgctgattggacgagaatgtcgagcgggctatgttctccttgtccttttagggaatagagcagccgcaccatatcggttcgagagagtttaaaaatgttcattgttcacctctttaaacaatttgacgcggatataggtctatgtataagttcaaaattcaagcgtcagcaaattacattaacatcatacgtcgaattccttgcattttcaaatggatgttttataatttaaatatacgggttcttttgaacttaaaataacggaggttgttatggcgaaaagaatttttctgtttattctaacgaatattttggtgcttacaacaatcgggatcgttttgtctgttttaagctctgttacaggagtcgggacgtactttacagctgatggcggtatcgatccaatggcgcttcttgtgttcagtttagtcgttggatttgtcggttcctttacgtctcttgcgatatccagatggatggcaaagacgatgatgggcgtcagagtgctgaatccgaaaaaacactcgctcagctatgaggaacagcaattggttgatcgtgttcacagattaagccgctctgccggtttaacgaaaatgccggaagtcgggatttaccgttcacctgaagtaaacgcgtttgcgactggaccgtcaaaacgccgttcacttgtcgcagtatcgtcagggctgctggagcagatggatgacgcagcagttgaaggtgtgcttgcccacgaggtcgcgcatattacaaatggtgatatggtaacaatgacgcttttacaaggcatcgttaatacctttgtcttctttttatcgcgtatcgccgcttggatagcaagccgttttgtcaaagaagatctagcgccgatcgttcattttattgcaataattatttttcagattgtcttttcgatacttggcagcctggttgtgtttgcgtattcacgccatcgtgaattccatgctgacaggggaggagcggatcttgccggcaaggacaagatgattcatgcgctacggacgcttaaaagctattcttcccggattatggaagacgatcagacagctgtccaaacgttaaagattaatggcaagaagcgctcttcgcttttctctactcaccctgatttagatgagcgaatcaggcggctggaagctaaataatacaaacacattgttcctctgagagaattctcagaggttttttattttatccattgactaaaatcataaaaaaataagcaagttaagaaaatgtttcgtaaaagcctttaaaaatggacctaatatctttagaataattaccgtacttaaaaagagaggcagaaggattttacatgagattaaagtttggaaaattgatacaggccttgtcaccggcccagctgatcgcattatattattttcttgcagttactgtggccgttatattgctgagtttgccggcggcccataaaccgggggcggattggacgtttattgatgcgctttttacagctgtcagttcagtcagtgtaacagggctgacagttgttgatacagctgatacattcagcacaatagggatttttatattagcatttgttctgcaatttggcggaatcggaattatgacgctcggaacattcatttggctgatcatgggaaaacgtatcgggctgaaagaacggaagctgatcatggttgatcaaaaccaatcccagttttcaggaattgtcaatctgatgaagcaggtactgtttctgatcttgtggattgaattttttggcgggctgattctcggcacatatttcttaacctactatgactcctatcaggaagcttatttacacggattttttgccagtatcagtgcaacgacaaacggcggatttgatattaccggtaattcgatgattccatttcgccacgattactttgtgcagtttattacaatgcttttaattatatttggagcgattggatttcccgtgcttgttgaagtaaaggatttcctgttttcaaagcatcggcgttatccatttacgctttttacaaagatcacgacgattacgttcggctcacttgtcttgtttggagccattggcatctttgccctggaagcaaaccatgcgttcgcaggaaaatcatggcatgatattttgtttttgtccctgtttcaatcaacggcaacccgaagcgggggactggcaacaatcgatatcagccaattatcagattccacactcttttttatttgtgcgctgatgtttatcggagcgtcgccaagctcagtcgggggaggcatacggacaacgacttttgctttgaaccttcttgcgctgtttcattttgcccgcggcaataaggccgtaaaggtattcaaacgggagcttcaccctgctgacttgatgaagtcgcttgttgtcacgatgatggcgatcctgctcgtttttggcgcgacactcattctgaccattacagaaaaacattccctgctggagcttttgtttgaagtgtgctcggcattcggtacaaccggcctgtcgcttggaattacggcagatttgagcagtgttggaaaatgcgtcattatgattgtcatgtttatcgggcgaatcggcatcctaaccttcctgtatctgatcggaagaaaggaaattgaagcgaactatcactatccgaaagaaagagtgattatcggataggcaaaacaccgcatactttgcggtgttttttgattgccaaaaaaaagatgtgtgcctcctgttcagttggagaacctaacttcgacaggtgcaatttacgctcctgcatcttaaaatgtctgaaaactggcgaggaggattcgtatgaagcgtaaagctgaagtgaatgaagccattaaaaataacaatacacctaccgagagcatggaccccaattcatataagacacaatatcatgacgaccccaattttagaggggcaaaccgcaattccaaacagggccagcagggaggcatgtagttgtgaagaaaaaccgtcatagcagagacatgcaaaatcataaaaagcctatgaataaaaaggtgctggaggaagagttctcaagtgaacttggggattacaatgccgggaagatcatcgaaacgctggaagtcaccaagcctgaaaagaaaaaagaaaaaaacaaaaataaaaaacaaaaataaaaaagacctcttaggcggcgtccgcttaagaggtgctttttctattttaaataagcatttttgcccgttcctctgacaaattgcaataagctggtcatcctcagctcaatgaagggctgagcgactgtcttaacaaagttgctggagaggactgatgtcagggctgctgttaaaagcaagaggatcactaagctttgatagtcagtaagccaatcctcaagcccgacctgtcgtaatgtcttaataataaacccgtgaagcagatacacgtaaaatgtccgggttccccatttggtaaagaaataccgtttttgcggaacaagcgctaaaaagctgaaggttgccccaaaggcgagtacataccagccgattcgggatagtccgcttaccagggtaacgtctccaaatgaagaatacggttttgaaccaaacagaaaagaatagtcaaaatcgatgccccagcagatgacgaatactgcggcaagcactccgagcgcaatttgtttgccgcgttttgatctcaataaatcaaaatgatgtttatttaaataaaaaccgacaaggaacatcggtaagaatacgaatgtccgtgacaagctcagcgtgctgctgacaaagtccagataaccgatcagcacggcgattccgcagctgacaaacagcgcccactgctttgaaagctttgaaaaaggatataggagcaggttccaaaagaataagcttacaagaaaccataacgaccattgcggatcaatcgggttcacatttgccatgctttcatcttgcataatgtaataaaagacggaataaatgatttggaaaatcaaatacggaataatcagcttgaccgccagcttttttacatatcccgcccgtttaaagcctttcgcgaaataaccggatacaagaataaatgcaggcatatggaatgtgtaaatgaacttgtagaggtagagcataaaatgattatcattaataaaggaacgaaggatatgaccgaatacaacaaggaatatcaataaaaattttgcgttatcgaaataactgtcccgcgatttactcatagcatcaccttctctttcatcagtcactaagagattattccctgctggtacatattttaaaataaaagatgaaaaaggaatctaaaaaaatgctgattgttaggtcgatgtaaagtgatggtaaggatcgtagaaaatgtcttcgtaatgtaatggcgctgaaattttctgaaatttatagggcaaatgaaggaagttcccgcattttgtagaaatattgagggataggttttgaagaaggagtgtacatgcatggaaactcttggtgtccagacaaactcggagctgcgagaggaactgaatcgcctcaaagaagaaaacgcgcgactgaaaaaggaattgaatcagcatcaagtgattgtcaacaatacgctcgatgctatttttatttgtgataacgaaatgcggattgttcaggcaaatgaagcaacagaaaggatgcttcaagttgactcggaggatttgaaaaagcgttctgttttggattttttgttttcaatcccaaaggatgaactgaatctttccgtaaagaagttttttaaaaaaggctttctgtggaaggaggttccgatcaggcttgattgcggggcaacaaaatacatagagtttctggccaaaagaggtattggcgaggatttcttttttgttgtcatgagggacatatcttctaagaagattctggagcgggaattctctatgaatgaacagctttttaaggacttgtttgacagagcagttgacggaatcgtcctgtttgataaagatggcggttttattgatgccaatttgtccttttgtaaaagctttgaaatcaatcataatgagctgtctcatttatcgttgtatgagttcatagacagcggctcacgaaaagatttcgacaatatctggaaggcgctcaaccgcaagggaaaagcgaagggggagctgcctgtcaagcttcgttcaggagttcaaaaactatttgaattcacgattacatcaaacatcatcagcggtttttatatgtccattatgagggatatcacagagaagcggtctatggagctacagctctttaaaagtgaggagcgcttcagagaaatctttgaaaatgcaatggacgccatcatcatctggtcgaatgacggaagaatcgtaaaagcgaatcaatcagcctgtaaaatttttgagctgccgatgaatttgctgttgaaaagaaagctgtgtgattttctcgttgactcgcagcagaaatacagcataacgaagaggaaatacgcaaaatacggagagatcagagaagagctgctgtttcaaatggggaacggccaattcaaagagcttgaatttacttcaaaacggacaatccttgaaaatcagcatttgacgatcttaagaaatgtaagcgacagaaagcggatggaaaaggagcttcgggaaagcgagctgaaattcagaaaagtgttcaacggctcaatggacggcaatgtattgttcgacaatcaatacaggatcattgacgccaacccgttagcaagccatattttgggactgtcacatgaagagataaaacagcacagcttgttagatattatttctgcttatgaaatagaaaatctggcatcaccggcaaggcagattaattttgatgaaatggacaacgaaattccatttttgctgagcagcggtgataacagaaaactcgaattctcatttaaacggaatattattcaaaatatgaacttggctatctttaaagacgtaacagagcgaaaagaattggaggaacgcctgcgcaaatcagatacccttcatgttgtcggcgaactcgcagccggcattgctcatgaaatcagaaatccgatgactgctcttaaaggcttcattcagcttctgaaagggagtgtcgagggagactacgccctttacttcaacgtgatcacctcagaactaaagcgcatcgaatccatcatcaccgaattcttgattttagctaagccccaagccattatgtatgaggaaaaacatgttacccaaattatgagggacacgatagaccttctaaatgcgcaagccaatctcagcaatgtacaaatgcaacttgatttaattgacgacattcccccgatttactgtgaaccgaatcagctgaaacaggtttttatcaatatattaaaaaacgccatcgaagtgatgcctgacggcggaaatatttttgtaacgataagggcattggatcaagatcatgttcttatctccttaaaagacgagggaatcggaatgacagaagataaattaaagcgccttggtgaaccattttatacgacaaaggaacggggaactggacttgggcttatggtaagctataaaattattgaagaacatcaaggcgagattatggtagaaagtgaagaagggaagggcaccgtttttcatattacgcttcctgtcagacagaatgctgaagaaagaaggaatgatgaatgaactactatacgacagccgagacgccgctcggtgaacttatcattgccgaagaggaggaccggatcactcgtctatttctcagtcaggaagattgggtggattggaaagaaacggttcagaatactgagcacaaggaaacacctaatcttgcagaagcgaaacaacagcttcaagaatatttcgcaggcgaaaggaagacattctccctgccgctcagccaaaagggcactccttttcagcaaaaagtgtggcaggcgctggagaggattccatatggcgaatcccgaagctatgcggatattgccgctgcggtcggcagtccgaaagcggtgcgcgctgtcgggcaggctaataaacgtaacgacctgccgatttttgtcccgtgccacagagtgatcggcaaaaacagtgcgttaacaggatacgccggaagcaaaacggagatcaaagcatttttgctaaacatcgagcgaatctcctataaagaaaaataaaacatatggcacgttcccttttttcacggccgacatatcattttattaagttaaaaaagttggtctgatgaaaaaggaggacaaagcaattgaagccgagccgctctgagaaacttgccgtttttgccgaactgtttgtgaaactgcatatcttatcaagcgctcaaaaagatgaaatcatcaatgttaacaaaaagaaacaaaaaaaccgctgactcggctccaaatgagcaaagtccagcggttttttaatgcaccttttctcctctaaacagctgttcaatctcttcttcatagtttccggtcataatccctttttctgtgatgattcctgaaatgagatcatgaggtgtaatgtcgaaagcgggattaaagacaggcacattggatggagcggtccgaactccggaaatctgcctgacttcctcgggatcgcgttcctctatcgggatatcagcgccgcattcgacctttgtatcaaatgtagataaaggtgcggcgacaaaaaacggaatatcaaaggcgtttgctaaaatagcaagaccgtatgtgccgattttatttgccgtatcaccgttctttgcaattcggtcggctccgacaataacagcggaaatttgtttttccttcatcgtatgggcagccatgctgtctgtgattagagtgacatcaatgcccccctgcatcagctcccaagcagtaaggcgtgaaccttgcaggacaggccttgtttcacaggcataaatgtgtaatcccaaatctttttgtttggccaagtaaaacggagctagcgccgttccatagcggcttgtcgcgattgagccggcattgcagattgtcatgatcctgtcgccttttttgaaaagctgcagggcgttttggccgatcaaccggcacgtttcctcatcctcgacctgaatctgaatggcttcatggacaaggtttgtttttgcttcatttacggaaatcgcgttttcgaccgaatgactcagtctctcaagcgcccatgacaaattaatggcggtaggccgtgagctgtttaaatattgtttgatgtcttccagtctgcggcggaattccgtgacattatctgtttcaatgtttttggcagcaagcgccagtccgaaggcagccgtaatgccgatcgccggagcgccccttactttgagcgtgacaatcgcatcaaatacatcctctttcgtcgtcagctccaaatattccgtctcatcaggaagcttttgctgatttaaaatggtaatagctgtttctttccattcaacagaacgtggaacagcaaatgaatgggtcatgaatagatcattcctttacaagtaacttaaataattcaataacatctgttatcgttttgaattccgaacgtttttcgataaaggctgtgccggtttcgagcgccaagcgttttctgccgattcgtttatcaaacggcacgatcgtatccaggtcagctacatgggcaaggccgatcgtgcgtcgtatcagctcacagcccgcaaatccgattgcttcttcaaaaatatggctgagcgtatcagtgaggtaaccgtcgatgttggcgtaaacatccagactgtccttctgccaggattcactaaacgtctcttcaaacgtttcccagacctttttgacatgttcatataacggctctctgtcagccccgtcacggctgagtgcgttcaaaaataagttggcgataaattgccctacatcaaagccgatcggtccgtaaaaagcaaactcaggatcaatcacctttgtttcgtgctcacttgcgaaaatgcttcctgtatgcaaatcaccatgaatcaacgtttctgcagacgttaaaaatgactttttcagcttagcggcttcgattttaacgctgtcattattccaaagcttttcgacaaaaggacgaagctcttcttcaaaatcatttgtgtcatggtcgaagaaaggatctgtaaaaacaagtctttccgtaatgtcgcatagctctggatttgtaaactgtttaacaagctgttttttcaccttaggttcaagcgcgtaatctgatgagtagaaaagtgtttttcctaaaaattcaccgatgtgctgcgacagatgaggatagttttcacccttaatgagtccttttcttgcgatcttgaggtgagagagatcctccatgacggtaaccgccatttccgtatcagaataaaacactcttggaaccaggtgaggcacatgctcgccctgacggatgagagcgctgctttcgattcttgcacggtcgattgtcagcggccagctttctcccaccacttttgcatacggaaccgcctgtttaatgattaatgctctgtcatgttcttgatcataaatatgaaaaacgtaatttaagttgccgtctccgatctcctggcatgtcagcgtgcttttgcttggaaaaaggccaagcttcaccgccaacgccacagcggagctttcatttaacgtttcgtataaaggtgtttttgtgactcccatcatcataacctccaattatgtaatcacttaatatgtagccgtaaaaaagcctccttctcagagagaaggaggcttaacagtctatgtccgcctctcttatctctcagatcagatctgaatggaattagcaccgtgccttaagagaccagcgtctcggcgcgaaaaagatgcgccccatttcacaatggaattacggtcggttgctgttggggtcaaaaggccaaatccctcgcccaactctcgataagagaatatattcacttgtttgacaattctaatttatcagttgatgaacatggtaacaggtaatttagttagttgtcaatattttttaatataaatcttttctgatatcatcgaaaacaggaatgctctcccgaacttctgcgctttcttgaaggtcgatttccgctcggactatgccttcttcccggccgccttcagcaagtacacgtccccatggatcaataatcaggctatgtcctgcaaattcattatccggatttgaaccggtacaattgcaggctgcgacaaagcattggttttcaatggcccgcgcaataagcaggcttttccaatgatcaaggcggggaagaggccattccgcagaaataaacagcacgttggcgccttttgtcgtatgttttctgatccattccggaaaacggatatcgtaacagatcaatccagagcttttgacgccgtcaagctcaaagtatccgtcttcggaaccggctgataaatacagatgctcatccatcagctgaaaaagatgggcttttctgtactctttaatgatttgcccttccttatccgcaatgtacattgtattataaacatcagaattcttcctgacagcgaccgacccggcgacaatatgaacaccatgtttttttgccgttttcttcagccagctctgagcggagcgcccgtcttcgtcagcgagttcatcaagattggccagatcatatccggtcgtccataattcaggcagaacaagaacatcagcatgtttgctttctttttcgatgaaaaattcagccttttttatattttccgaaggtttgccgtatgaaatatcaaattgaagacaagatatcgtccatttcatctttttaacaccccaaatttttctttacttttttcatttaaccatatatgatgatggactatcatttcaagatttttttagaaggtgagaatagatgaaatttgaacagtctcatgtattgaaggaattgcctaaacaattcttcgcttctctggtgcagaaagtgaaccgaaagctcgcagaaggacatgacgttatcaatctaggacagggaaatccagatcagccgactcctgaacatattgtcgaggagatgaaacgagctgttgctgatcctgagaatcataaatattcgtcttttcgcggctcataccgtctgaagtcagcggctgctgcattttacaaaagagagtacggcattgatctggatccggaaaccgaagtcgctgtattattcggcggaaaagccggtcttgtcgagctcccgcaatgcttgttgaatcccggtgatacgatcttagttcccgatccgggttatccagattactggtcgggtgtcacacttgcaaaagcaaagatggaaatgatgccgctcgtaaaggacagggcgtttctccctgattacagcagcataaccgctgaagtaagggaacaggcgaaattgatgtatttgaattatccgaataatccgaccggagctgttgctacttctgagttctttgaagacaccgtgcgttttgcgactgaaaatggaatctgcgtcgttcacgattttgcttacggcgctgtaggatttgacggctgcaagcctttaagctttttgcagactgaaggtgcgaaggatatcggaattgaaatttacacgctgtcaaaaacgtataatatggcaggatggcgggttggctttgccgtcggaaacgcttcggtcattgaagcgatcaatctttatcaagaccatatgtttgtcagtcttttcagagcgactcaagaggctgcagcagaggcactgttagccgatcagacgtgtgtggcagagcaaaatgccagatatgagagcaggagaaacgcttggatcacggcatgccgggaaatcggctgggatgtaacagctcccgcaggttctttttttgcatggctacctgtgtctgaaggctatacttctgagcagttctcagatcttttgctggaaaaagcgaatgtggcggttgcggctggaaacggcttcggtaaatatggcgagggctacgtcagagtcggacttttaacaagtgaagaaagacttaaggaagccgcttatcgaattggcaaactgaacctgtttacccaaaaaagcattgacaagaccttataacgatgggataattcaaaataatttataaaatctatattttcttatcaagagcaggcagagggacgagcccgatgaagcccggcaaccgacttataaagcacggtgctaattcttgcagctagcggctgagagataagattcggacgagaaacgaaacctctttagacgcgattgcagtttgaagaggttttttgatatggatgaaaatgaaaggagctctggcatgagtgagttattagcgacatatctcctgaccgaaccgggagccgatacagagaagaaagcagaacaaatcgcaacaggattgacagtaggctcctggactgatctgccccttgtaaaacaggagcaaatgcaaaagcataaggggcgggtgataaaagttgaggagagagagggaactcctgcatcagcaaaacaagcggtcatcacaattgcctatcctgaaatcaatttttctcaggatattccggctttgctgacaacagtgtttggcaagctgtccctggacggaaaaatcaaattaatcgatcttcacttctctgaagcatttaagcgtgcactgccgggaccgaagtttggcgtatacggcatccgaaagctgctgggagagtttgagagaccgctgttaatgagcatatttaaaggcgtaatcggaagggacctgagtgatattaaagaacagctccggcagcaggcgcttggcggagttgacttgattaaagacgatgaaattttctttgagactggtctagcgccttttgaaacaagaattgcagaaggaaagcaaatattgaaagaaacgtatgaacaaaccggtcataaaacgctgtatgcggtgaatttgaccggacgtacggctgatctgaaagacaaagcgagacgcgccgccgagttgggagcggatgcgcttttgtttaatgtcttcgcttacggcttggacgttatgcaaggccttgcagaagatcctgaaatcccagttccgattatggcgcatccagcagtgagcggagcgtttacgtcttctccgttttgcggtttttctcacgctcttttactcggaaaattaaaccgatattgcggtgctgacttcagcctctttccgtctccatatggttcggttgcgcttccaagagcagacgcactggcgattcatgaagaatgtgtgagagaggatgcttttaaccaaacatttgcggttccgtcagcaggcattcatcccggcatggttccgctattaatgcgtgatttcggcatagaccacattattaacgccggaggaggcgtacatggacatccgaacggtgcccaaggcggggggcgagcgttcagagccattattgatgcggtcctagaggcccagccgattgatgaaaaagccgaacaatgcaaggatcttaagcttgcgctagataaatggggaaaggttgaagccgtatgacgactcgaaaaccttttattatttgtgattttgacggaaccatcacgatgaacgacaacattataaatatcatgaaaacatttgctcccccagagtgggtggcattaaaagacggcgtactttccaaaacgctgtcgatcaaggaaggtgtcgggcggatgttcggccttctgcccagccgtttaaaagaagagattacaagttttgtattggaagatgcaaaaattagggaaggctttcgggaatttgtagcatttatcaatgagcacgagattccgttttatgtcataagcggtggaatggacttttttgtatatcctttgcttgaaggcattgtggagaaagaccgcatttattgcaaccatgcttcatttgacaatgactatatccatattgactggcctcattcctgcaagggcacatgcagcaatcaatgcgggtgctgtaagccgtcggtcatccatgaactttctgaaccgaaccaatatatcatcatgatcggtgattcggttacagatgtggaggcagcaaagctgtctgacctatgctttgcaagggattatttattaaacgaatgccgggagcaaaacctcaatcatcttccgtatcaagatttttatgagatcagaaaggaaattgagaatgtaaaggaggtacaggaatggctgcaaaacaagaacgctggcgagagctcgctgaagtaaaacgggaattggcagagagagattggtttccggcgactagcggtaatctatcaattaaggttacagatgagcctttaacatttctcgtcactgcaagcggaaaagataaacgtaaagagacggttgaagattttctgctggtcgatcaaaacggagagcctgctgaaagcgggcattctctgaaaccgtcagcagaaacgcttttgcatacacatttgtacaataaaaccaatgccggatgctgcctgcatgtccatacggtaaacaataatgtgatttcagagttatacggagaccaaaagaaaatcacattcaaaggccaggaaattataaaagcactcggcttgtgggaagagaacgcagaagtgaccgttccgattatagaaaatccggcacatatcccgacgcttgcggcactgtttgtggaagagatttcagaagattcaggagctgttctgatccgaaatcatggtattacggcttgggggaaaacagcatttgaggcaaaaagagtgcttgaagcgtatgaatttttgttcagctaccatttgaaattgaaaacactccagcatcagctggttaaataaaaggaggaattgaaatggctacaattcgaattcatgatgaggcaaatacaacgattgaaaatcaagaggaagtggcaagctttctggacagtcaagaggttatttatgagcaatgggatatcacgaagcttccggaacatctctcagagaaatatgacctgacagaagaagaaaaacagcaaattcttgataccttcgaaactgaaattaaagatatctcaacccgccgcggctataaagcacaggatgttatttcattgtcagacagcaatccgaaacttgatgaactgcttgaaaactttaaaagagagcatcaccatacagacgatgaggttcgttttattgtaagcggacacggtatttttgtcattcaaggcaaggacggcacgttttttgatgtccgtttaaaccctggagatttaatctccgtgcctgagaatatccgccattacttcacgcttcaggaggaccgcaaagttgtcgcggtgagaatttttgtcacaactgaaggctgggttcctatttatgaaaaagacagcgtgaatcaataagcatgagatagccccgttcatcgaacggggctttttatatttattgcaaacgccacttttcatactgtgacagttcttttttaatcattgtccaaatcaaacctaaaacagctgcatcgtcaatgaatccaagaccgaggatgacgtctggaatgatatcgagcggcatgacgatatacaggattgcggcagttaacagcaaaagtgttttaacctgtgaacgagggtagtcgccatttcgccaatcgcgaagcatctgaaaaaaagtagtgatgtgctggatacatttttttcggtttttcctcttcaaaattgcttttccgcctgccgctccgagcataattgctttctttttcttcattgggcatacctcctgcctggcggcgtgtttaagatattcttcacctgggtattgttcttctaatcctatcaatatatctattatacctgaaaaattaacttatttaatgaaaatatgtttacaaataaagtataatctgtaataatgcacaataacccaatcaaacttgtttcctatttcttagcggcgaggggtgaagtgaatgggcggttcttctgaacaagaaagattgttggtgtctattgatgaaaaaagaaagttaatgatagatgccgctagaaagcagggatttacagggcatgacacgatcaggcacagtcaggagctggattgtttaataaatgaatatcaccagcttatgcacgaaaacgaacattcccaagggattcaaggccttgtaaagaaattaggcttgtggccccgcagagatgttatgccagcatatgatgcaaataaatagcggcctatcagatgcatatataaagagagagcttttcggaagcgctctttttttctggaaaaaattcatatgaaagggggaactaatgaaggaactggcgattctcattaccgaaatggtcaatcaatttcatgatgcttttatttccttatgcggaatatttggcatttatttaactgacaaagaaatgcatttttgggtgatcggcatttttggcatattctttttcggcgtcactcacgctgtgtttacatggctttctaaatggagtatgacagccttgtcctttatctataccgttacagtcatcattgtcatcgtatttgcgattgagattcagcaaaaggtgacggggagagggaatatggagtttttagatgccacggaaggtataaagggttttttagtattttttatgttttttttgcttttgaaaatgctgttgcgtttcatcaaaatccttttttctggaagaccagcaagcaaatcgaatggcaatacccgatcacgaagataaaaaaccctcctgacatggtcaggggggttatgaagcggatacagggagggtgattgtcacctctgtgcctcttcgcacttcactttcaatatgaatagagcctccgtacatcagcacgatccgtttacaaacaacaaggccgagaccggttcctttttctttagaagtaacaaagggaaggaagatgtgatccagcatttcctgagaaatcccttcaccgttatccacaactttgattatggcttttttatctaaagctcccagggagatcgtcagtttgcctccttcaggcattgactcgaggccattttttgctacatttaaaatcacttgtttaatatgatcttttgtacattttacgagtaagggctgctcggttaaatactgtaattcgacttcaacattgtatagattgccctcagaataaatgatcggcataatttctccgataatgtcctgaagtgagttcagctcccatttttcagctgtcggcttgccgagaacaagaaactcactcactatttgattgatgcgcttgatctcctgttcgataatggagaagtaaagctgatcttcctcacctttatatttcttttgcaacagctgaataaagccgcttatgccggtaagaggattacggatttcatgggctgtgctggcagcaagcgtcccgatcagctctaatttttgcgcctcattttctgagcgctccagctgggtctgccgcttcagcaaataatacagcacgagaataaaaaggatattcagcagaacaataatacatgaaagcggaagcacaaggcttttcgtcagttcttctattgtgaccgggttcggatagactttcatattccagctgatatcatccagatatccgctgacaggtttctgatcctctgcatgagatgcttgtccgctcgcaaaaatcattttcccgtcttggttcacaacttcaatataaacatcagggcttagtaagttaatgagatttttcaaataatcaatttgaatagctgcgacaagataatctgtcacattacgttttgagtccaaaacagggacacaaattgtgaaaattggctgaccagtaattctgctcgaataactatctgaaatgactgtctttttagtttcctttgcttttgtaaaaaaagatctgtcggccaggtttacattcgtttttaattcggttgtgcttgcggtgacgtctcctttggcattgagaaaatagagaccggaaaatctcggctctgaatcaaaggtcttttccaaaattgactgcattttctttatatcaaccggtctgtcaatggcgatggacaaggaggtcattctcgccattgtttctccgattaaataattgattttgttgcggtgaaggtttagcaggacacttgcttcttgtttatgttctgcagctattgtatctttttctttttcatatacgaaaaagctgatgacgattgccggaatcacgaccagtatgatataaagtttgactctcccgcaggcgccttttagtattttcaatttgcatcgctccaacatacacctgattagaggtattatatcattgtttcttcttctttaataagaaaaaataaccaaaaaaattagaaaaaggtgttggcaagcttacattttaaaaaagaagagaaatattggaaagatttttattgacattttggtctttgtttattaatgtttctctgtaacggtttctaaaaggatgattgagacatgacagaaaaatcactgaagttatttatcgtgctgtcgcgcgcgtatcggtctattaacgatcatatgaataagcatattcataagcatgggctgaatccgactgaatttgctgtgctagagcttttgtaccataaaggcgatcagccgctgcagcagataggagataaaattctcttggctagcgggagcatcacatacgttgtagataagctggagcaaaaagaacttctcattcggaaagcgtctcctacagacagacgagtgacatttgcgcaaattactgaaaaaggcatcggtcttttgaacgatattttccctgatcacgctgctgaaattgatgaaatgatcagcgtattaagcgaagaagaggtagagatgtgcaccgaaatgttaaaaagagtaggattaaacgcaaaacagtttcataataagtaaaaaaaggaagcctgatatgtcacaaggcttccttttttgctatttttcatttgtttccgctgcgcctctcggcaaaatgagaacttcaacccgccggtttttgcttcggccttccgcagttttattggaagccaccggtttatactcgccataacccttggcgctgaacacttttgcatcgagcttggggttttcaatcaggagccccataaagtttaccgctctcatgacgcttaaatgccagtttgattggaattcagaatttttaattggcatattatcagtatgtccgctgataatgatatttcttggcgggttaatcacaagaagatttgaaatctcttttgcaagcggcacatcttccttacggatggtcgcttttccagaatcaaagaagatgctgtctttaatcgtaatcagaaggccttcactagtcatcttcgtctccagctgatgttccagctttttatctttgatgaacttttccacctggctcttcacattttcaagttcttcttgatcagctgctttttctttttctttcttgtttttctctttctcttctttttcctttttcacttcatcgatgccgtctgactcgttttcaggaggagtgacactggagtagtccagtacaccggtgccgcctgtaaagacttcattaaatgattttgagagcatttgaaacttagctgcgtcaatcgagctgctcgcgtacagcacaataaacaatgccaggagaagagtaaggatgtcggcgtaaggaacgagccatgattcatcaacgtgctcgtcctcatgcttcttcttcttttttctcgccattttgcgcctctccttgttctgcaaatttcaagcggtccttcgcaggaagatacattaaaagcttttgttcgatgactttcggtgcttgtccttctaaaacggataaaacaccttcaatcatgacctcacgcagttttacttcttgttttgattttcgttttaatttatttgcgaaaggatgccataacacataccctgtaaagataccgagaagtgtggcaacaaaggcggcactgatggcgtgtccaagctcatctgtattgtccatatgagagagagcggcaatcagcccgattacagcgccgagtactccaagtgtcggagcgtacgttcctgcttgtgtaaaaatagcggctccggcttggtgtctgtcctccattgcttcgacttcctctgtcataatatctctgataaattccgcgctttgcccgtcaacagccatgctgagcccgtttttcaagaaagcatcatctacatcctcaatgcttgcttctaaagcaagcagaccttcgcggcgtgcaagctgagcccattcagagaacataggaatgagttcctctattgtgagctgtttattttccttaaataacactcgaaacagcgcaggcacttttttaatttcttttgttgggaacgcaataacgactgctgagattgtcccggcgataataattaaaatggcagcggggtttgcaagggcgctgaaactgacgcctttcagaaccatcccgacgctcaatgccacaaaagcaagaataataccgattaacgaagttttatccatagtttttcaccaaatccttttttactatcttgtctatggttaatatcggttttggtgcccggaactttagggacattgtgaatttgttcatgaaatattcaaggaagaggcatagaagggagaaataaacaaaaacgggctctccaaaattgaaaagcccgggtgtctactgaaattagcagctttcttgcaagctgtccttcagatggtattcatataatagtagaaatacatattcactgtatataaacatgttccatccctccttaaaaaaagtgtaaaggatgaagggaagtagcgcttcaggggaagggacggtattttctaagtcaagagtatgaaagcataaaaaaagcggcttcctaaaaggaaaccgctgattgttatttcgctcgcactttgattttatcatcttctaaaatcacgtgaaaacttgtgatctcgccattatcaagcagcagatcggtcatttcatcctcaacccattcttggatggttcttctaagcggacgtgcaccgaatgaagggtggtagcccagctcagcgattttttctttcgcttcatctgtcacattcaagctaatgccccgttccgccaatgtttcttcaagttctccaagaagaaggctgacgattttgacaagatgttctttttccaatgagcggaactcaataatgctgtcaaaacggttgaggaactcaggtttaaagaacatgctcagtgaatcaattaatgtttgttcttcgatgacactgtcatctgattggaaaccgactttcgtttgtttctcaccagcacccgcattacttgtcatgatgatcacagtgtctttgaagcttacggttctgccttggctgtctgtcagacggccatcttccataatttgcaggaacatatgctgaacgtctgggtgtgctttttcaatctcatccagcaacacaatgctgtaaggattgcggcgcactttctcagttaattgtccagcttcctcatggccgacatatccaggcggtgaaccgataattttagatacggcgtgtttctccatgtattcgctcatatcgagtcggataatagcgtcttttgtgccgaataattcatctgccagtgttttagaaagctctgttttccctacgccggtaggaccgacgaagaggaaggagccgactggtctgtttttggattttaaaccggcgcggcttcgtcttaccgcctttgccactttttgaacagcggcttcttgtccaatcacgcgttcatgaagttttgcttcgagttctttcattttcgtttgttcgtctgcctgcagtttgccgacagggatgcctgttttttgttcaacaatttcctgaatgtgctcagcttccacagtgacagcagtatgagcggaggagctgttcagttttttctccaatgcgagttcttcatcacggagttttgcagccagttcgtaattttcttcttccagggcttttgttttttcggcttcaattgcagttaagcgttcagcggcatcctcatcattcagttcatcaattaacaggttagcttttgaacctgcttcatctaataaatcaattgctttatccggcaggtgtctgtcctgaatgtagcgggatgataaagtgacacacgctttgattgcttcatcactgaatgttacgccatggtacgcctcgtatttgtctttaatcccttgcagaatgaggatagcctgttcaattgaaggctcctgcaccatgacaggctgaaaacgtctttccagcgcggcatctttttcgatttgacgatattctttcagtgttgtcgcgccaatgacttgcagttcgcctctggctagggccggtttgagaatgttgccggcgtccattgatccttctgcagagcctgcgccaacgagaaggtgaatttcatcaatgaacagaatgacattttttcgttccttcagctcagtgatcagctgtttcattctctcctcaaattggcctctgatccctgtgtttgcaacaagggatgcaacatcaagcaaatatagctctttgtttttcagtttgtttggaacatcaccttcagcaatttttaaagcgagcccttcagcgatggcagttttccctacacccggctcaccaataagaaccggattgtttttgttccggcggtttagaatttcgatcactcgcgccacttcatcatcacggccgatgacgggatcaatgagaccggctttagcaccgtttgtaatattttgagccagctcatcaagcagccctttttttccgctttgttttgctgcgctcttttctttcggctggaatgcctgttcaaacggaaatccgaaagattgaggacccatactcattgaaggtttacgggtcagttcgttatagcaagtttcacaaagaaccatctgtttatgaacggaatttatttgcatgttaaggcgaatcgtcgcctcgttttgatgacaatgttgacaacgcatttgccaaaacctccttaataatttgatcttctttgaccaatgaaagtgaataaaaaggtctattggatttgaccttctttgactattagtatacggcaaacttaacggctttcaaaccaatatgctcaaagcagactgaatatttgactatctttgaccaattggtttttaaaaaaggccggtttgtttgaccaactttgattaatagtatactctgaccatctttgactttcaagccttttgcacaacattttttaatttgttacaaagtaaaacatgttttcttcgtcttttcaaggaacttgtctcataggttataaaaaggcatctatggacaaaactgcggttcgttcggaggggagaaatggaacaatcaaaagggtctgcaagtcagcttgcttttgtgtatgtcggcacagtagtcggagctggatttgcgactggcagagaaattgttgagttttttctgaagttcggctggttcggtttattcggcattctcgtcagcggcggaatgtttacgtttctgggcgccaagctgatgatcatttcaaagcgaatcaatgccaagtcatatcaagaaatgaacatctttttgttcggggcggcggctgggcgaattatcaatgtatttatgctgtttgttctcctcggagttacatctgtcatgctttcaggagcaggggcgctttttgaggaacaattggggatgtccgctcagattgggatgcttattacaatcggtctgagcttaattgtgatgactagaggagtaaaaggcattttcggtgtcaatgtgtttgttgttccccttttaatcctcttttcaatgattgtagtggccgactcttttatattcagcgaatcacgaaacgcagctcagtgggtctggccgcatcgctgggattggctgttatcagccttttcttacggggctttgaatttatcgcttgcccaagcagttttggttccgctggcgaatgaaatgtcctcggagaaagtgatcaaaaaaggcgctttaatcggagggacgatgctgacgattgtgctgtccgcgagttttctgtctttgtcaactcttccggatgtatttttgtatgatataccgatggcacaagtggtttatctctttgcacgatctgtccatttgatttatttactcattattttcggagaagtgttcacatcagttatcggtaatctatatggattagaaaaacaagtgcaaagctttcttccagtgaaaagcaaatatatctttgcggccattatgatcacggcttatattacgagccaaatagggtacggcaggcttatttcaacgatttatcccttgtttggctatgtgagcctggccttcataggcgctttgctttgcaaaaaagctcctcggcggcgcagtttataaatatatataatgaaacgaaccgtcactatagagcgataattgatctaggaaccggggactgacttttttattgtcaagaaaaacatcattatggtaagatagcagaagtgaaaaaattgaagaaaatccgtgcgatatgcgggagaggttctagctacaccctctataaaaaactaaggacgagctgtatccttggatacggccttttttatgtttttctagagcaccttccgaaaaaaggtgtttttttgcgtgaattagctgtagcgatgtctctcgccggcgtttttattgcggagaaggagaggaatcatgaaaaaagaaaaagcaattgtcgtatttagcggcggccaagacagcacaacatgcttactgtgggccttaaaagaattcgaagaagtcgaaacggtgacttttcattataatcagcgacattcgcaggaaattgaagtggcaaaatccattgcggaaaagcttggtgtgaaaaatcatttgcttgatatgtcacttttaaatcagcttgcaccgaatgccctgactagaaatgatattgagatagaagtaaaagacggcgaactgccatccacattcgttccaggccgcaatttggtattcttatcctttgcgtctatcctggcttaccaaattggcgcgcgccacattattacaggagtttgcgagacagacttcagcggttatcctgactgccgtgacgaattcgtgaaatcttgcaatgtcacggtaaatctggcaatggagaagccgtttgtgatccacacgcctctcatgtggctcaataaggcggaaacgtggaagcttgcagatgagcttggcgcgctggattttgtgaaaaacaacacgctgacatgctataacggcatcatcgcagacggctgcggcgaatgtccggcatgtcaccttcgttcaaaaggttatgaagaatatatggtgatgaaaggagagcgtgcataaattgttatctcaaatttatccgcaggcccagcatccttattcgtttgaactgaataaggacatgcatatctcagccgctcattttatccctcgggaaagtgcgggagcgtgcagcagggttcacgggcatacgtataccgtaaatataaccgttgccggcgacgaacttgacgattcaggctttcttgtcaatttcagcgtactcaaaaaactggtgcacggaaactatgatcacacgctattaaatgatcatgaagatttttctcaggacgaccggtattcgctgccgacaactgaagtcgtggcgaaaacgatttatgacaacgtacaggcttatttagacactttggagaataagccgacctgtgtacaggtgtttgtccgtgaaacaccgacaagctactgtgtctaccgtccgaaaaagggtggtttgaatggctaaaggaattcctgtattagaaattttcggcccgacgattcaaggagaaggcatggtgatcggacagaaaacgatgttcgtccggacagccggctgcgattattcctgcagctggtgtgactccgctttcacttgggacgggtctgctaaaaaagatattcgctggatgacggcggaggagatttttgcggagcttaaggacattgggggagatgcgttttctcatgtgacgatctcaggcggcaacccggctctgttaaaacagctggatgcttttattgaactgctgaaggaaaataacatccgtgcagcgcttgaaactcaagggaccgtttatcaggattggtttacgctgattgatgacctgacaatttctccaaaaccgccaagctcaaaaatggtaacgaactttcaaaagcttgaccacattttaactttacttcaagagaatgatagacagcatgctgtcagcttgaaggttgtcatctttaatgatgaagatctggaatttgccaaaactgtgcacaagcggtatccgggaatcccgttttatttacaagtcggaaatgatgacgtgcatacgacagatgatcagtcactgattgcacatttgcttggaaaatatgaagcgcttgttgataaggtagctgtcgatgcggagctgaatctcgtcagagtgctcccgcagctgcacaccctgttatggggcaacaaacgcggagtataatagaaaggaagatgaacatgacgacaagaaaagaatcagaattagaaggtgtaacattgctaggcaatcaaggtacaaattatttgttcgaatatgcaccggacgtgctggaatccttcccgaataaacatgtaaaccgtgattactttgtaaaattcaattgcccggaattcacatctttatgtcctaaaacaggccagcctgactttgcgacaatctacatcagctacattcctgatgaaaaaatggttgaaagcaaatcattaaagctgtatctattcagcttcagaaaccatggtgacttccacgaggactgcatgaatatcatcatgaatgacttgattgaattaatggacccgcgctacattgaagtatggggcaaattcacgccaagaggcggaatttccattgacccgtacacaaactacggaaagcctggcacgaagtatgagaaaatggccgaataccgtatgatgaaccatgatttgtatccggagacaattgataatcgttaattattccgttgtgtgatacggagtgtaaaaggaagtggagtcacagtaaaatccgaacattcagcgttaattttcagcgaagtgtgaccggagtgtgacccgcactaagctcaataaaagtgggaaaagtcacacctgaaaatggctctactcatgggaattgtattaaaaagtgtgacctgaggtgcaacctgaactgtgacttttatgcagtgaaaaattgatagtacagaagcagattaaggcgtacaatttgtacgtcttttcttttttatccgaaagaaaatatgcctatctagagatcataggcattaaatattattatcaatatcttcatttattttttggctaagtttctgaaccttctctttaacatttgaaacagctcttttttgaatttcatcaaagttctcctgaatatagtcgatgacacttcttattagaacttcactttcaaaattgaatatctcatttatttctgactgttcttcatctgttaggtgatggtattgaagttgtttagcatttacttcagtagctacatcaatcctaacttagttgttctggttgtacaatttcatattcaccttctgtatacttttgctccgcataatggcttccccattgacagagctcctgcaagataggtttaagagattctccaagttcagtggatgaatattcaaccttcggcggtacttgattatacatctttctgctcacaagtccactggcttcaagctctctaagtgtttgaatcagcattttctgagttatatttgggataatgcgctttaactcactcgttctctttggtccattcattaaaaagtataatacaaggcctttccattttccgccaataacttcctttgtcacttcaaacccacagctaaattttttcatgtctaaagctctccattccacatttattactttttagttactatatcacaaaaaagtgggtacttccgataatgggcttactgaaggatactatatcttgtaagttgttcttcaagtacttaaaggtactagacataaaataaaataattctaaaggagtgttaagtatgggtaaatttgaaggtaaaatagcgcttgtaacgggtggaacaagtgggattggtcttgctacagcacaaaaatttgtaaacgaaggtgcatatgtttatatcacgggacgtagacaaaacgaacttgataaagctgttaaccaaattggcaagaacgtaaccggtgttcaaggtgatatttctaagcttgaagacttagacaaactatatgacattataaagcaggaaaaaggtaagttggacattctttttgctaatgcaggcatcggcaactttcttccattaggtgaaattactgaagagcaggttgatagaacgttcgacattaacgttaaaggaaccatctttactgttcaaaaagcgttatcactattcccggacaaagtaggttctattattgtaacgggctctactgctggatcaattggcaacccagcgtttagtgtatatggagcatctaaagcagcattaagagcactggttcgcaactggattcttgacctaaaaggtactgaaatccgtgtaaatgtggttagtccaggaggtattcttacacctgcctacgatgagctttttggtgatgcacttgaagaagtaatggaaaatagcagaaatactgttccagctggaaaagttgggacacctgaagaagtagcaaacgctgtatctttccttgcttcagacgaaagcagttacttgacgggtgttgaattgttcgtagatggcgggctagcacaggtataatttcactgcgcagagattacaaatagtccccaaaaaaggttaatggggatttacttgaagaagtcgtataaaaaagtcgttttccttaaaggacagggaattcgacttttttatgtttgaatttgattaacgttgtaaattcgcattttcctggggctaccactaaatgacctgtaaaaaagattacactgtgaataaatgtacttaaagtaacgggggctcttgacttttaataaaaaataatatccctgtccttgtattctaatacttttgaaaatatttaaaggaatccttatgtcctgaataaccacataggaaaatatgttgtaggttgctttctttttttgtggggcatcccacacaagctatcttgtgatctcacacctgaacgttttttatagactagtaccgcgacaagttatattacatatacataccaataaagtagacattaaaagtgaaagagaggatggaaatgtgtgaaaattcttttccttgagagtcatcccatgtggctctatggtttaccgaatgggtttagggaagcaggacataccgtaatgatttccggtcctgtaagtcgggaaaatatcactgaaatgatagacgaatttaaaccagatctaatagtatctatgggatggacaccagagcattcaagggaaaagcaggcctggattcgcaacgctactaaaaaggtgaatatccctctcgtttattgggctactgaagacccgctgcacactcaaaactttactatcccgttaattaaaaagatgaaaccagattttgttttcacggttacgccttctctgtgtaaaacttatgaaagcatggggattaaagcagctcacttagattttgcatttcacgaaagtatacatcaccagattaaaccattagcaaaatacagttgtgatatagcagtggtggctaatgcttaccctaattttcttgaagaacatccggaagtgttccgttcgtcctctttaaaaacgcttattcgtcctcttatacggaagggtattcgcattgatttttgggggagaaactgggaaaaaatgagtaaatatataggaagagaaattccccccaattggatccatggataccttgattatactgaagcatataaagtttacagttcagcaaaagtcgttatcggtttgcaaaactgtgaaagccaacttacgcaacgcacctatgagattcttggttccggggggtttttattgacatcggatacaccagcagttcgaggtaaattcaaatctggccgcgatctcatcgtttcttcctccccaaaagaaacattggaaaaggttaaatactatttgaatcatgatagcgagagaaaaaagattcagataaacggtaaaaaggctgtaaagaatgattcctatcggcatagagccgagagaatgcttgaggtgctaaaaagcagaggaattataagaaacttaggggaaaccattcattatgtagatgttctcaaagaaaaatacctgatccatcatgttactcccggtgaaacattatcaataattgccaggaagtataatgtttccctgcagcaactcatggagcttaatcatttcaaatcagatcaaatatatgctggacaaatcattaagattagagagaaactgtttagaaatattaataacaaatttttctaaaggagagtaatatgaatgaaggagagaataccaaaaaaggaaatagagcgaataaagtaaaaagaacgcctcgttatatggaatttcccgtgacatacgaagtatataatgtggaatccggcgatacattatggacgattgccaaatcctttaaaattccggtacaacaacttatgaatcttaataagctttcttcagatagaatttatcctggacaaattataaagataagagaaagataatctttgaggtttcggaaacgaatcaaattgaaatgacaatccttatttttttatttgtggggaacttgatatttttggggatgaaggggttatgagatgtttcaaatgagctatttctattctggattaggatgggattttattcaacacgttgatcaaacgaacggagtattaaatgttgtgtctcctgattttttctatatcagaaaagatggatcattacttctccgttcagctaatcccgatgtgattaaagctcttcatagaagaaaattaaaagtagttccttttctaagcaatcattgggatcaggatttgggacgatttgcattaatgaaccgagttcgtttagctaaacaaatttctcatgcaatagaagaactggatttggacggaattaatatcgatatagaaaaccttacagaaaaagatcggaatctatttacagattttattagattagtaaggaaaagtattcctaaacataaagaagtatcagttgcagtggcggcaaatccttttggctggacgaagggctggcacggatcatatgattacgagtatttagctaaatatgcagattatcttatggttatggcctatgatgaaagccgccttgctgggcctaccgcaagtgtaggatgggtggaaaagtccattcaatatgttctgacccaaaaaatctctcctcaaaaactagttttaggattgccattctatggccgctgctggatggaaggccaatctgcctctcaagccattcccctttaccttgttgactccttagtaaaaaggcatagcgggacaattatttttgacaccaagagtcaatctccaaaagctatttttactgtcaatcacgataacaaggggccgttgccttcgggaacatatacattatggtttgaaaatgaacagtcactcagagcaaaaataaaactcgctcaaaaatataatctgaaaggtcttggcagctggagtcttggacaagaagatgtgtcagtctggaatacagtgtttaaaaatatataatgatttatagttcagaacaaaattcgaagataattgcaatgaatctctaaatggacatactgaaaggagtttattacgagtgcgggtaaaacagtgagggcattccataggcccttctcccgaaatgttctatacgaggcattacattgggcttgaaatacacattcaaacttatgttatagtacgcatttcaagtaattacggatgtgttgaatttattctgcttccatgatttaagtcatacacatgctacttgatagcaggattattgcatttcattcagaattgttcaggatcgatatggaagcgcacgaataactagaactttaaaagcatacactcatatacttcctgaatggatgctggtttatctaaaaaacatgatgagaattgattgaccgctctcattaaaggatggagaaattcaaggcgccaaggtacgcatggtgaaacatgacttgttgataatcgaccatatagtttctccttagaaatgagggggtttttacataaaaaagacgagcgaatccggggggaattccactcgccgctttctaatgaaaagacgggatgctggatggcagctcgtctgttttattataatttaacgaacgtatgtttgtaaaggtgtcttttcgaatgaattggttcatataaccgttaagaacagattcattgtaaacattcgctaaggtatgctaagatgcatggactataaaggagtgatatgaagtgaagacattgcggttaaacaatgtaacgttagaaatggctgcatatcaagaggagagcgagccgaagcgaaaaattgcatttaccttaaacgttacgagtgagacttaccatgatatcgctgtcctgttgtatgaaaaaacgtttaatgtcgaggttccggaacgcgatcttgccttccggggggaaatgacaaattattcaacatcattgaccaacctgtacgaaccaggggccgtcagcgagttctatatagaaataacagaaatagacaaaaacgccgattcatgatcggtgttttttatgtaaaaaagctgccggccggcagcttttgagaaagcgaatttcatatgtaaggtgttaaattgtccgtcttgcagttttttgaataaatgtggaaataaggaggttttaataggagtctctgatgatcttataatttttatgattaacaactgtcaatgaatctaactcaagatcccgatagttatccatgatcgtcacatcaacgataacagaattctcatttactttttcaacaacaccggttaatccgtttttaaattcaatgacattcccaaccttagcgattttcacaagcttcctctcctttaaacataataatgccttttgaaagtattttgcagtattttcattgagaagtaaagcgataaggagttttatctcccttatgaattgtcctgtcgctataaagatgatatattgattttcgtcaatagaaagaaaaggggggaatttttgttgcgtcccgaagaaataacagaaatgattgaacagctgcgcaccggcgccataaacgaactgagagtccagaaagagcattttcttgatttcagggccgtgttatctaaacaagatgattttaaacatttccgaggaattgcccagcaaggcggagatgttatctttcaatacttagaacagccaagaagctgaaggtttctcatacgtgagaagcctttttatcatatatgacagaacacaagccttttattacagctgtctgtaacaggtgtaataaaatgtaaagtgtcaaaaatggataaacatgttttaatttgacaatatttatagaatttcaaactgtttttttgccattaagcagtgagtcatcctctttattccatcctgatacctccttgggagagttggaaaatctttttccgtgaaaatgaatggatctcttgttaaggttatgaagtgttttttggagcactttaaggaggaaactgtatgacaacgaaattcactgctctggctgtttttcttctttgtttcatgcctgcagccaaaattgagcatacacaagcttcactactgagcgcaaagaagacaaaacatgaagaagcgaaatggcttacacatatagatcgaaatacgaatgaatctttcccttcactgtctgctgataaagacaagaaaataaaaccgattaagctatcagcacacactgaaaagaaagagaaagataaaccggacaaaacaaatgatgagaaagaaacatatacacagtctgaaaaagagttgctgtcacgtctcgttcacgcagaggccaaaggagaatcatataaaggcaaggtcgctgtagcaagcgttgtactgaacagaacggagaaaaaaggttttcctgatacgataagaggagttatttatcagaaaaacgcctttgaaccggtcgcaaacgggagcattaaccaaaagcctgataaagaatcgattgaagctgccgaagaagcgctgtcctcaaaaaatagagaaacagatgccatattcttttataatccgaaaacagcgtcagataattggattcgttcaagaaaaatcgtagaaaaaatcggcagacacgtttttgccgtctaagcatagaagagacaatttgtctcagctgtgcttttttcatataaagagtaaaaataaaataatttttgaacttgtctcatatgatgttggtagtacaagagacaaggagagacatcatgaatcgatttgtgaaagggatcattcttttatccattgccgcctttttcgctgaatgccttgaatttgtcgtcaatatgattttggcgcgggagcttggcgagcatgggatggggctttacatgagtattttgcccacgatctttttaattattgtcatcgcgagcctggaactgccgatatccatttctaaattcattgccgagtcaaatcctaagcttcatgaaagcatgctgaggcacgctttcagaatgacagccatttttactgctttttctactgtcgccgctagtattgcgcttccgtttataccggtatttgatacataccacccgtttattaaagggattgtcatcggcttaattcctgttgtcgcctttacttcaatcgccaggggctactttatgggtgtgcagaaaatggggaagatcgcaattgccaatgtgctgaaaaaaatcatccagctcttgtgcttattcctcttttttcaatggtactcatttgaattggacatggctgtgctgatttccttgtttgttctagtcgtgagtgatgtggtcgtgcttgtttatttatattcacaatttatcatggcaaggcgggcgttatccggccagcagcacattcatttgcgcggaaaggatgtaaggaaaagactgcttgctgtttcaattcctacaacaggactgcgtatttttcatgcggttgtcaatgcaattgaaccctttttagtaaaaggagctcttttggctgcgggcgttgccgggacagcggcgatcgatcaatacggaatgctggcaggagtggctgtgacgatagggtcgttccctgcttttattgcccattcgttaatggtcgtcatgataccgagtatttcggaagcttatgcactttctcagtatgacatcgtgttaaaaaggctgaagcagtcgattttcattacattaggttacggtatacctgccgtctgggtcatgttccagtttgcgggacctctcacgcatttgttttttcactctcctgaagcgcagtattatttgcagctgttgtggccttactttctctttcatctgtttgtcatgccgctgcaggcgtgcttaatcgggatgggttttgtgaaagaggctttttatcacaatgtatggagtcatatcgttgcgctaagtatgatgtatgtactgggatcaatggagaatctgcaaatgctcgggattatccttggaatgaacactggcatgattcttttgacgagcctgcactatgccacgatctgcaaagcattgaaggtatccgtattccttacgggagggaccagaacgccgcgaattgaaggatgatataggaactgcaggggcaagctaattgaaaagcatgaaaggaagattccatgttgacgaagcgcttgcttactatatacattatgttattagggttgattgcatggtttccatgtgcggcacaagctgaggaaaaacagcctgctgttcccgctgtttttcttatgaaaacgatagaaggggaggacatctcgattccgaataaagggcaaaaaacaattctccatttttggacgtcatggtgtccgccctgcaaaaaggagcttccccagtttcaatcgttttatgatgcccatccatccgacagtgtaaagctggtaacggtgaatttagtgaattcggaacaaaatcaacaagtcgttgaagattttattaaagcaaacaagctgacgttcccgattgttcttgactcaaaaggggaattgatgaaggagtatcatatcattacgatcccaacatcatttttgctgaatgaaaagggagaaattgaaaaaacaaaaattggcccgatgacagcggaacaactgaaggaatggacggaagaatagctgagagcatagactctcagcttttttcatatagagaagaagcgaataaacattaatgataattattatcaaaaagaaattaaaataattataattgaaattctcttcgtgcgtgctataataaaggaagacatcaagaaataactgacgataaagctgccttttgggcagcgattttgtttttataagagaaatgaagatgatttacgttctcaattagagaggagaattcgatatgaatgaacaagttatcgttcaacgcgacccgcatgagccattgaaaacagacaagagggaaaaaaactgggcacagcacgcggagcttattgcagcacttgtatcaggcgctcttattttggcaggctggctcttatccggatatcaggtattatccataatacttttcttgctggcttttgtgatcggcggatttgctaaagcgaaggaaggaatcgaagaaacactcgaagccaaaacgctgaatgtagaacttttaatgattttcgctgccgttggttccgccttgatcggatactgggcagagggtgctattttaatatttattttttccttaagcggagctttagaaacatacacgatgaataaaagcagcagagatttaacgtctttaatgcagcttgagcctgaagaagcgacattgatggtcaatggtgaaaccaaaagagttccggtttcagacttgcaggccggtgatatgattgtgatcaaacctggagaacgcgtagcggcagacggtatcattgaatcgggctcgacaagtcttgacgagtcggctttaacaggtgaatcaatgcctgtagaaaaaaacacaggcgacactgtattcacaggaacggtgaatcgcaatggctccttgactgtccgtgtcacgaaagcaaatgaagattcgttattcagaaaaattatcaaactggttgaatcagcgcaaaatagtgtttcacccgctcaggcttttatcgaacgatttgaaaatgcttatgtgaaaggtgtgctaattgcggtggcgctccttttattcgtcccgcactttgcgctgggctggagctggagtgaaaccttctaccgcgcaatggtgtttatggttgtcgcgtcaccttgtgcgcttgtcgcctctattatgccagcggcgctgtccctgatttcaaatggcgcccgcaacggtatgcttgtgaaaggaagcgtctttcttgaacagctgggctcagtgcaaatgatcgcctttgataaaaccggcactgtaacaaaaggccagcctgccgtagagacgatcagaatagcagaaggattcagtgaagcggaagttcttgaggctgtctatgccatcgaaacgcaatcaagccatccgctcgcccaagccataacggcgtacgctgacagccgtggcgtgaatcagtccggctacatatctatagaagaaacctcagggtttggcgttatggcagaagtgtcgggtgcgatatggaaggtcggtaaagcaggttttatcggcgaggaaatggcagcacaatttttgaaacaaacagcatccgatgtcattcaaagcggtcatacaattgtatttgtgaaaaaggatgatcaaatagtatgctgtatcgcactgaaggaccaaatcaggcctgaagcaaaagaggtcatggaagaactgaaccgacttgggattaaaacggccatgctgacaggagatcacgaagacacggctcaagcgattgccaaggaagccggcatgacaactgtcgtagcagaatgcctgcctgaccaaaaagtgaatgaaatcaaacggttaaaagaagaattcggaacgattgcaatggtgggtgacggaatcaatgatgcgccggcactcaaagcggcggatgtcggcattgcgatgggcggcggaacagatgtagcacttgagaccgctgatatggtcctcatgaaaaacgatttgaaaaagctcgtaaacatgtgccgcttgtctcggaaaatgaacaggatcatcaaacaaaatatcgtgttttctctagctgtaatctgcctgctgatttgtgcaaactttttgcaggcgatggaattgccatttggcgtgattggtcatgagggcagcacgattttagtcatactaaacggtttaagactcctaaaataaagccagcagcctaatcaggctgctggctttttatgtatcaagctttcccttcatttttgtctttatcagatcttttcataaccaggatgagagcgaggatgcagcaaaggaaacccgctgcacagcctatgatagagctgtaataataaaagcccaccatcttcatcccgataaaaggagcggaaattcccaaaaccgttaagagcataactgcttttcgtctgaaaaaattcatcagcaaacggaacaaccccctgcgattgaacgttactgtcagtatacaggaagaggagcaggaaataaaatgcattagaaaatgaaggcgtcgtgaaaggcaaacaccggtaaaacctgttacaatggaagacagaacaatgcattgcaaatggcagggaggaacaagaagtgaatagaatacaacgcgtctcttcatggctgaaggaagcggggcatactgccgcatttattcatacaaaagaaaatgttttttacttaaccggtttttacacagagccgcatgaaagattaatggggttatttatttttcaagaagaggagcctttctttgtttgtccaggaatggaagcaggacaggcccgcaacgcaggctggaatcatgaaatcattggctatgcggatcacgaaaatccatgggagctgatagagaaggccttgaaaaagcgaaatatcagcatacatacgcttgcggtagaaaaggattcaatctcgctatcacgtgcagaacagctgaagcatgcgacgggcggggctcaatttgtttcagcagaagaaacactcaatcaatttcgcctgattaaagaagacaatgagattcgtttgctgaaagaggcggcaaagcttgcggattacggtgttgaagtcggcacagccgctttgcgtgaaggcatcagtgaagtggaagtgctcgctcaaattgagtatgagctgaagaaaaaaggaattcagggcatgtctttctctacaatggttttattcggagaaaaatcaggccagcctcatggaaatcctggtacagccacgttgaagaaaggtgattttgttttatttgatctcggtgttattcttgacggctattgctctgatattacaagaacgtttgcatacaaaaccatcaatccgaagcaggaggccatttacgagactgtgcttcaagcggaaaaagccgcgattgaggcaagcaaacccggtgtgagaatcggagatctggatttaacagcccgtggaatcattgaaaaagcgggatacggtgactattttcctcaccggcttgggcatggactcggaatttctgtccatgagtatccatccatgagccaggccaacgatacactgttgcaggaaggcatggtctacacgatcgaaccggggatttatgtgcctgagatcggcggcgtgcgcattgaggatgacgttcacgtaacaaaggacggagcagttgctctgacccaatatccaaaggaattaatcatactgccgtaatagaaataaaaaaggactttgttctcgacatcgtccttttttatctgcattaaataaaaaaatcatcaaatgttcgaaagggtttaatttcatgtttttggttgagaggttttacagcaagacagctgccaccgagaacagtgagacataacccaattaaaatgaagaaacccatgtgatcttctcctttcagcttaaaacacaaaaagatatctggtacgtccatatcatattgtatgaaacgcattccagatcaaggggatttagaaagaagggaatctatggctaatattaaagacattgcagaaaaagccggtgtctctgttacaacggtttcccgagtcataaacaatcatccatacgtcagtgaagacaaacgaaaaagagtgtttgaggcaatggaatcattggagtacacgagaaatattcacgctgtacatttgtcgaaaggattttcaaacatgattggtgttgtcttgccaacggttaatctgccatattttgcagagctgattgcaggaatagccgacgcagccgcggaatccggggttcacctctctttattccaaacaaactatgaggtacaaaaagaaatctttgcgctgtcccaattaaagcagcgccaggttgacggcctgattttttgctcaaaggcgcttgctgatgagaaactcatggaatgggagggcccgattttgctttgccagaattcagataatgcccgcttcccaaccatcagcattcctcaccaagaagcatttcggaacggcttggactatttaattgccaaagggcacaaaaaaatagccatctgtttggcaagaaaaaaaggcatgaacagccattttcgaatcaaagcctacaaagaggcattggaagagatcggcgaggcatttcgtgaagactgggtaattgagaaagcgattacaattaatgatgggaaggcgctttttcataaatggaaaacgtggaaggaaaagccgacggctatttttgttgccaatgaccaagtctcagcagggctttttcttgaagcaaagaaccagcgggtgtcagtaccggatgagcttgcaatcttaagcgttgataaccacgaaatcagccaagcgcttggaatcacaacgatcgatattcagacaagggaaatgggaaagcaggcatttgccatactggaaaaaagaattcaaggacagccaattgaaaggaaagttctggattaccgtctcatcgaaagatcgactgtttagtgaatgcattgaaaaaaggtttgacgtgcattccgttcgttatgtacgatatgaggtattgaatgacaaaggagctgaggatcgtgaatgggtccttcacagtgaaaaaggtactgaataataacgtattaattgcttctcatcataaatacagcgaagtcgttttaatcggaaaaggtattggtttcggaaaaaaacaagatgatgtcattgaagataaaggctacgataaaatgttcattttaaaagacgagaaggaacaaaagcaatttaaaaagctccttgactatgttgatgaaaagctcgttgatatttcaaacgatgtcatctatcacataagaaataggactaatcactcattaaatgaacatattcacattgcgttgacagaccatatcgcatttgcgatcaaaaggcagcagcagggatttgatatgaaaaatccatttctaatggagactcagtcactatatcctgaggagtaccaaattgccaaagaagtcatagatatgatcaatgaaaaagcgggaatctgccttccggaaggggagattggttttatcgctctgcatatccattcagcattgacaaaccgtccgctgtccgaggtcaatcagcactctcagctcatggcgcagcttgtcgaggtgattgaagactcatttcaaatgaaagtaaataaggaaagtgtcaactatttgcggctgatcaggcatatcagatttacaatagaaagaattaaaaaagaagaaccgactaaagaaccagaaaaattaatgttgttattgaaaaatgaatatccgctatgctacaatacagcttggaaattgattaaaatcttgcagcaaacattgaagaaaccagttcatgaggcggaagcggtttatctgacgcttcatctgtaccgattaaccaataaaatttcataaattcagtttatccttataacgtgttactgattcgatcaggcatgagtgattgagggaaaaaaacgggaagttcattctcgttcttttgcgcacccaattttgctcatgcctttttgttgtgtaaaagggcaaatgtaaacggttaaactggaagacttacgcctgtgaattcgttgtcatgatttttagctgtaaggtcagactagtaaaaagaggaggtcaattcttatgtttaaagcattattcggcgttcttcaaaaaattgggcgtgcgcttatgcttccagttgcgatccttccggctgcgggtattttgcttgcgatcgggaatgcgatgcaaaataaggacatgattcaggtcctgcatttcttgagcaatgacaatgttcagcttgtagcaggtgtgatggaaagcgctgggcagattgttttcgataaccttccgcttcttttcgcagtaggtgtagccatcgggcttgccaatggtgatggagttgcagggattgcagcaattatcggttatcttgtaatgaatgtatccatgagtgcggttcttcttgcaaacggaaccattccttcggattcagttgaaagagccaagttctttacggaaaaccatcctgcatatgtaaacatgcttggtatacctaccttggcgacaggggtgttcggcggtattatcgtcggtgtgttagctgcattattgtttaacagattttacacaattgaactgccgcaataccttggtttctttgcgggtaaacgtttcgttccaattgttacgtcaatttctgcactgattctgggtcttattatgttagtgatctggcctccgatccagcatggattgaatgccttttcaacaggattagtggaagcgaatccaacccttgctgcatttatcttcggggtgattgaacgttcgcttatcccattcggattgcaccacattttctattcgccgttctggtatgaattcttcagctataagagtgcagcaggagaaatcatccgcggggatcagcgtatctttatggcgcagattaaagacggcgtacagttaacggcaggtacgtttatgacaggtaaatatccatttatgatgttcggtctgcctgctgcggcgcttgccatttatcatgaagcaaaaccgcaaaacaaaaaactcgttgcaggtattatgggttcagcggccttgacatccttcttaacggggatcacagagccattggaattttctttcttattcgttgctccagtcctgtttgcgattcactgtttgtttgcgggactttcattcatggtcatgcagctgttgaatgttaagattggtatgacattctccggtggtttaattgactacttcctattcggtattttaccgaaccggacggcatggtggcttgtcatccctgtcggcttagggttagcggtcatttactacttcggattccgatttgccatccgcaaatttaatctgaaaacacctggacgcgaggatgctgcggaagaaacagcagcacctgggaaaacaggtgaagcaggggatcttccttatgagattctgcaggcaatgggtgaccaggaaaacatcaaacaccttgatgcttgtatcactcgtctgcgtgtgactgtaaacgatcagaaaaaggttgataaagaccgtctgaaacagcttggcgcttccggagtgctggaagtcggcaacaacattcaggctattttcggaccgcgttctgacgggttaaaaacacaaatgcaagacattattgcgggacgcaagcctagacctgaaccgaaaacatctgctcaagaggaagtaggccagcaggttgaggaagtgattgcagaaccgctgcaaaatgaaatcggcgaggaagttttcgtttctccgattaccggggaaattcacccgattacggatgttcctgaccaagtcttctcagggaaaatgatgggtgacggttttgcgattctcccttctgaaggaattgtcgtatcaccggttcgcggaaaaattctaaatgtgttcccgacgaaacatgcgatcggcctgcaatccgacggcggaagagaaattttaatccactttggtattgataccgtcagcctgaagggcgaaggatttacgtctttcgtatcagaaggagaccgtgttgagcctggacaaaaacttcttgaagttgatctggatgcagtcaaaccgaatgtaccatctctcatgacaccgattgtatttacaaaccttgctgaaggagaaacagtcagcattaaagcaagcggttcagtcaacagagaacaagaagatattgtgaagattgaaaaataagggtgttagtacgccgtgcttgtcagatgacaagtacggttgtatgatataatattgtgaagtaataaagctttaagttaaaaggagaatgataaaaatggcacaaaaaacatttaaagtaactgcagattctggaatccatgctcgtcctgcgacagttcttgtacaaactgctagcaaatacgacgctgacgttaatttagaatataacggcaaaacagttaaccttaaatctattatgggtgttatgtctttaggtatcgctaaaggcgctgagatcacaatctctgcttccggagctgacgaaaacgatgctcttaacgctttagaagaaacaatgaaaagcgaaggactcggcgagtaatgcaagaattaaaagggattggtgcttcagccggcatcgcgattgcaaaagcataccggcttgaagagccagatttaacggttgaaaagaaaaacatctctgattctgaagcggaagtaagccgttttgatgaagcgattgcacgttcaaaaaaagagctcgaaaaaatcaaagagcacgctttgaaagaactgggtcaggataaagctgatattttttctgctcaccttttagttctcagtgaccctgagcttctgaaccctgtgaaagaaaaaatcagcactgattcagtgaacgctgaattcgctttaaaagaaacgtcttctatgttcgttaccatgtttgaatctatggacaacgaatatatgaaagagcgtgcggcagatatccgcgatgtaacaaaacgcgtaaccggccacctgcttggcgtcgaaattccaaacccaagcatgatctcagaagaggttattattgtagctgaagacttaacaccgtctgacacagctcaattaaaccgtgagttcgtaaaaggattcactactgatatcggcggacgcacatctcactctgccatcatggcacgttctcttgagattccagcagttgttggaacgaaagcggcgacaggcacgatccaaaacggcgtgactgttatcgttgacggtatcaatggcgatgtcattattgacccatctgcggaaactgtaaaagagtatgaagaaaaacataatgcttatttggctcaaaaagctgagtgggcgaagcttgtcaatgaaccgactgtctcaaaagacggacatcatgtagagcttgcagcgaacatcggtactcctgatgatgtaaaaggtgttcttgaaaacggcggagaagcagttggcctttaccgtacagaattcctttacatgggaagagatcagctgcctacagaagatgagcagtttgatgcttacaaaacggttcttgagcgtatggaaggaaaatcagtcgtcgtgcggacacttgatatcggcggagacaaagagcttccttacctgcagcttcctaaagaaatgaacccgttcctgggatatagagcgattcgtctttgccttgaagagcaagaaatcttcagaacacagcttcgcgcgctgcttcgtgcaagtacatacggaaacttgaaaatcatgttccctatgattgcgacagttaacgaattcaaagaagcaaaagcgatccttcttgaagagaaagaaaagctcgtaaaagcgggacaggctgtatctgacgatattgaagtcggaatgatggttgagattccgtcaactgcagtcatcgctgatcagtttgctaaagaggttgatttcttcagtatcggaacaaacgatttgatccaatacacaatggcagctgaccgtatgaatgaacgtgtatcttacctgtatcagccatacaacccggcaatccttcgcttaattacactcgtaattgaagcagcacacaaagaaggaaaatgggttggcatgtgcggagaaatggcaggagacgagattgcgattccgatccttctcggcttaggcttagatgagttctcaatgagcgcaacgtctatccttccggcaagaacacaaatcagcaaattgtctaaacaagaagctgagtcattcaaagagaaaatcttatctatgagcacgacagaagaagttgtcgcgttcgtaaaagaaaccttcaagtaatgtacaaaaaccagacggcctccggcctgtctggtttttttcataagtaagggcatagaaggacacaataacatggctaggagggatagtatgtcaaaccaatttaacgcaggagatactgtttatgtgatctacagaaatccgcacgctgccaatgtagctcacataaaggaagccgaaattgtgcaccatccataccatgaaggcgagctttccctgtttatttatgaaacctatcatccgttcgcagaggacgatgctgtgtttgcaagctatgaagaagctaaatcgctttacaaagaactgtttgatattgatccgtatgagtaacaaggaaatcattacaactcatatcctttccgcctagtgagaaaagtaacgttagtaaaggaaaaggatgtggcatcatgcagaacccatttgttccgcagcttgtgtatatagaaccgagggcgctggaatatccgctgggccaagaattacaagataaatttgagaatatgggtattgaaatcagagaaacgacatcccacaatcaggtgcgtaatatccctgggaaaaatcatcttcagcaatatcgcaatgcgaaatcaactttagttatcggtgtccggaaaacattaaagtttgattcatccaaaccctcggccgaatatgccattccgtttgcaacaggctgcatggggcattgtcattactgctacctgcaaacaaccatgggatcaaagccgtatatcagaacttatgtaaacgtcgaagagattttagatcaggcagataagtatatgaaggagcgcgcaccagagttcacaaggttcgaagcatcatgtacgtcagacattgtaggaattgatcatctgacacacacgctgaagcgcgccattgaacattttggccaaagtgatctcggaaagctccgatttgtaacgaaatttcatcatgtcgatcacctattagacgcaaagcataacgggaaaacgagattcagattcagtattaatgccgactatgtgattaaaaactttgagccgggaacttcacctcttgataagcggatagaagcggcagtaaaagttgcaaaagcaggctacccgctaggctttattgttgctccgatttatattcatgaaggctgggaagaaggatacagacatctgtttgaaaagctagatgctgctttgccgcaggacgttagacatgacattacgtttgaattaattcaacaccgttttacaaaaccggccaaacgagtgatagagaaaaattatccgaagacgaagctcgaattagatgaagaaaagcgccgttataaatggggccgttacgggatcggaaaatatatttatcagaaagatgaagagcatgcacttcgagaggcacttgaatcctatattgatacctttttccctaacgcaaaaattgaatatttcacttaaacgggctgttgtgatcaacagctcgcttttttataaaaaggatttttccattccatcaaaacgccgtaattcaatgattctttatcctccaaataattgctgactacacgaataggtgaacgcccgcaacggaggagaaaggacagcacagggtcgtttttcctgccttccatcacatcttcaacgtactgaacagcgctgatctcgtgtgcgtatttataatacaaaggaatgcggccgccgccgagaaggcgttccagtcttttatcaacagtcagctcatacatcgtattcatcagccattttccgattccaagctttcgataatgaggagaaacagaaatatccactacatataaagtatttccatgaggttcatgatttttaatcgatccgttgtcagttgcttgtgcccatgtatgatcaggagattcaggctcaaattgtacaataagagcagtcatggaaccgataattctgtcattgatgagcgcgcataaagcgccttccggaaaggttttgatatggctggcaagctggtcctctgaccacagcaattcctggggaaacggaggagggaaacattcttcttgaagagaaatcagcctctcgatgtcagtctcagtgtagtttctaatggtcagagcctcaaattttctgccgtcatgcacatacatttgttttagtatgatcatcactctccttatgttgtttcattataacgaagattgaattttcagtaaatatattccgattttcttataatttattttttgattattcatttttcaaacgaaagggccgatatagaaattaggaggggattggtttgtttaaaaaacttcacatgaagattgctgtttttgtttcgattatgttaatcatcacagttgttcttttaatgctgtcttcttatttgacgctaaaaccgatgattacagaggatgggaaaaatacaactcaaaacgtgacgcagtcacttgaacaaaatattgaattgcaattaaagagttatgccatttcgttatcaagattggctaatggggaattaacgcatacatttgtaacgaaaccaagtaaagaagcttctcggctgtttcacgatgacattaagcaaatcaaagataacgatgattatgttgcgatggcttacataggcaccgcaaaaaaagaaatgtttacatatccaaaagcggatttcgctgaggattacgatccaacatcaagaccatggtataagcttgcagctgaaaccccggatcaagttgtttggacggaaccttataaagatgtcgtgacaggagacatgattgttactgcatcgaaagcgatcttagacgggcaaaaagtgataggggttgccagctatgacttgaaactctctgctatccagagtatggtcaataaacaaaaggtgccttacaatggatttgcctttttagctgatgcgagcggcaatcttttagcccatccgtcaaatcaaggaaaaaatatatcaaaggatcaaacactgcaaaccatcgcatccgagaaaaaagggatacaagatgtgaatgggaaaatggttgtgtaccaaacgattggcgaaacgggctggaaggtcggaacgcagtttgataccgatcaattaatgtggatttcagataaaatgaatcgggcaaatctttggatatcattgattgcgcttatcataacaattattctcagctacttcctggccaaaacgataaccggcccgatacagcagctgatcgcaaaaacgaaagctgtttccgcaggcgatttaacagtgcgcgcggaatcaaaatccaaggatgaagtcggtattttaacaagagactttaatctgatggttgaaaatatgaaggaaatggttgagcaagtcagactctcttcagggaaagtatctgacacctctgaacaattaacggctgtctctgccgaaacaaatgaaacaagcggacaaattgcaaaagcgattgaagaagtagccgcaggggcatcggaacaggcttctgaagttgaaaccattaatgaaaaatcggaaagcctgtcaacgaaaatcaggcaaatcgctgaggaggcaggcggaattaaagaacgatcaaaatcgtccgaggatgcaagctataaaggacttgacgcgctcggccagctgctgatgaaatcaaacgaagccaatatggaaacgaaaaaggttgaaacgatgctgctggatttggaaaatcaaactaagaatattgaagaagtcgttacagcgatttcaaacatatctgatcaaaccaacttgcttgccttaaatgccagtattgaggcagccagagccggagaaagcgggcgcggttttgccgtcgtagccgatgaagtgcggaagttagctgagcaatcagccctttctacaaagcatatcagcgagactgtgaagcttatccagcttgagacaaaagaggcctctcacgcgatggttgaggcaagcagaatgaatgatgaacaaaacagtgccattcacgaaactggagaggtattaaatacgataactgcagaaatgcagtcactggtacaaggtattgatcacatttacgcggaaattcaaagaatgagtgaagaacagcttgcgatatctgaagctattcaaagcatttcagccatatcacaggaatcagctgccgcagcagaggaagtgaacgcatcaaccgatgaacagcttgtcacccttgagaaagtcaaacactcaacggaaacactaaaacatgcaagccaagagcttatgaacacaattgcaaaattcacattgtaatccaattacatccccaaacatcatttgttttggggattttttattttataagatgaatagatatggtagtctagaaaatgaaggaaaaatgataaattttaactaaaatctaaacgaaacatctgggaggaatgaccttgaaaaaaacaattggttttatcggtcttggagtaatgggaaaaagcatggcatcacatattctcaatgacggccaccctgttttggtgtacacccggacaaaagaaaaagcagaaagcatacttcaaaaaggcgcgatctggaaagatacggtcaaagatctttcgaaagaagcggatgttatcatcacaatggtcggctatcccagtgatgttgaagaagtgtatttcggaagcaatggaattattgaaaacgcaaaagaaggcgcatatcttattgatatgacgacatctaagccttcgcttgcgaagaagattgctgaagcggccaaagaaaaagcattgttcgctttagacgctcctgtttccggtggagacgtcggtgcacaaaacggaacactcgcaattatggtcggtggagaaaaagaagcttttgaagcctgcatgccgattttctctttaatgggagagaatattcagtatcaaggaccggctggaagcggacagcataccaagatgtgcaatcagattgcaattgcagccggtatgatcggtgttgctgaagcgatggcttatgcccaaaaatcaggcctagagccggaaaatgttctgaaaagcatcacaacgggcgcagccggaagctggtcattgtcaaatcttgctccccgtatgctgcaaggcaactttgaaccgggattttatgtgaagcattttattaaggatatgggaatcgcactagaggaagcagaattaatgggggaagaaatgccaggcttgtcgctcgcaaaatccttatatgacaagctagctgctcaaggtgaagaaaacagcggaacacagagtatctataagctttgggtgaaataaaaaaagattgcctgtacgaaacaggcaatcttttttttattattttccgatgaattgttgtgtccagatgcttccagactcaacgtagccaacaccgatgtgagtaaagttagggtttagaatgttttttctgtgtccttcactgttcatccaagcttttactacttcttctggtgtcttttggcccttcgcaatgttttcacctgctgttttgtagctgattccgaaagatttcatcatatcaaacggtgagccgtatgttgggctttggtgatcaaagtagtttttgtctttcatatcctgagattttgcgcgtgcggatttgcttaacgtttcatcaatttgaagcggctttaatccttgtttttgtctttctgcatttgtaagttcaacaacttttttctcatatgcacttacagatgaaggtgcagatgttgttgtgtttgttttttcagcagttgcaggtgctttagaagcagtgttttgatcagcagctgctttttcagtagtcttttgtgcaggttttgccgtttctgtcttttgaacatcctgaactttcacgttagattgcttcgcatgtttttgaagaagctgcttcatctctttttcgtttgcagcgtttaacgttttgatatttgtgttaatatgcagctttttcactgcatcgttaagtgacatgttttgtactgtgttccccgtttttactgtaaccacaggctggcaggagagttctttcgctgatgcttgctgtacgcccccgaatgtgaataatccaaccgcagcggcagcagataaaataaatgctttcttcattagttcgtaacctcctagagttgtttgtttctacagaaaaatcataacatagcttttttgtcataaagattccagcactttcctttgacaaatagagattgtcattttcgtaaagtaaatccgttgaatcactaagaataagggaatcagcggtatatatgattttatcgtaccgttacatagcttccttttttttgaaccgttagttatattttaatgtgtttttatattgacagcttttttttactccttttcgctgtaacaactattacaaaggtgttacaattaatctcagtatatgtaaatatattgaacgatttgagaggggtaaccagaagtgactgaaataggacgtgaaccaaagaaaaagagcaaaggaaacagagcaatcagaatgaacctttttttcctagctgtctttgttctattcactgcattaatttttaagctcggggttgttcaaattgttgaaggcgaacagcatgaagaagacgctgagaaatcaaatgcaaaaacagcttactatcctgcgcctcgcgggaagatgtacgacagaaaccagaaagttgctgtcgacaaccagagcgttccagaaattgtgtatgtatcaacatctagcacaaaaacagaagataaaatcaaaacagcgaagcggcttgcttctttcattcatattgataccgaatttttgaaggaaagggatctttgtgattactggatcgcagctcatccgaaaaaagccgccgctctgcttaaggaatcagaaagcaatctgaaaggagaccaagcttacaagcttcaaatagagcgtgttccggatcaagaattaaaggctattcagcaagatgacgaagaaatggaaactgctgcgatatatacaaggttttcaagcggaaatgcttacgaacctcaaatcgtaaaggcaatgaatccaaataagagcaatagcaatggaaaaaacggagcgctgcttgatgagaagaaaaactcctcgcaaagaccaaaaaatgacttaacatatgatgaaatttccattgtttctgagcatttagaagaacttccgggaatcgatatcgtaaacgattggacacgaaaatatccttatgacaaaaccctttattctgttttcgggggcgtcacgacacctgatcagggcctgctgagcgaccggaaagatttctacttaacaagaggctatgcgaataatgacagggtgggaaaaagttatttagagtatcaatatgaagaatatttaaattcgcataaagaaaaagtggaatacgtagaagataataaaggaaatgtcgtcagccaaaaaaccattgataagggcagcaggggatacgatcttcagctttcttttgacatggagcttcaggcaaaggtagaaaagattattgaagaagaagtaagaaacagccgtgcacgcggaaattacatgcttgacagagcctttgccgtaatgatggacccgaataacggcgatattttatcaatggcagggaaaaagatagatttaaaaaccaacaaaattgaagattatgcgataggggcatttaccacccaatatgaaatgggatcagcagtaaagggggccaccgtgctagccggctatcaggacgggatcccgcattataaatattttgttgacatgccactgtattttgcaggaaacggtaataagcctaagaagtcctatatgaatatgggaactattaatgaattaacggcattgcaaaaaagctcaaacgtatacatgtttaatgtcgccatgcacattgccggtgtcacatacaagccgcatggacctcttcctgctgaccagaaggatttaaacaaaatgagaaattactacagccaatttggcctgggagtaaagacaggcatcgatctgccgcaggaatcagccggtatgcaaactacacctgatgcggtaggggggttaattttagacttggccattggacaatacgatacatatacaccgcttcaaatggctcagtacatctcatcaattgccaatggggggtaccgcattcagccaagaattgttacaagtgttcatgagcccagcaaaaaagaaggccttgggaagaccattgaacaaagaaagccaaacattctcaacaaaattaacaactcagaaagtgacattcagcaggtgaagactggaatgaagctagttaccacttcgggaacagctagaaatacgtttgcagaggatgtttccggaaaaacaggaactgctcaaacattttattacggaacaaatcgtaattggtggggaaaaagcacgtacaatctaacatttgtcggctattatccgtcaaaaaatccaaaagtggctttcagtgttgttgttccttctgtagcgaacgaccacgacccgatcaacaaactcattgccaaaagagctatccacgcctacgcagagctcgaaaaaaaacacagtaaaaaataaaaaacagggtgcacaactaaaagattgtgtgccctttcttttattcaaaaattgacgttcaccataagaatagaaggagaatactcattttctagcgaatcatactaggtaaaagtcaatctgtatatgtcgaaacacgatgatcatgcaaaggagggattctgtggaacaggatacgcagcatgttaaaccacttcaaacaaaaaccgatattcatgcagtcttggcctctaatggacgcatcatttatatatctgccaactccaaactgcatttgggctatctccaaggagagatgatcggatcattcctcaaaacgtttctgcatgaggaagaccaatttttggttgaaagctatttttataatgaacatcatctgatgccgtgcacctttcgttttattaaaaaagatcatacgattgtgtgggtggaggctgcggtagaaattgttacgacaagagctgagcggacagaacgggaaatcattttgaaaatgaaggttcttgaagaagaaacaggccatcaatccctaaactgcgaaaaacatgaaatcgaacctgcaagcccggaatcgactacatatataacggatgattatgaacggttggttgaaaatctcccgagtccgctatgcatcagtgtcaaaggcaagatcgtctatgtaaacagcgcgatgctctcaatgctgggagcaaaaagcaaggatgctattattggtaaatggtcctatgaatttattgaagaagaatatcatgatatcgtgaaaaacaggattatacgaatgcaaaaaggaatggaagtcggaatgattgaacagacgtggaaaaggcttgatggcacacctgttcatttagaagtgaaagcatccccgaccgtctacaaaaaccagcaagctgagctgctgctgctgatcgatatctcttcaaggaaaaaattccaaaccatcctgcaaaaaagccgtgaacgatatcagctgctgattcaaaattccattgataccattgcggtgattcacaatggaaaatgggtatttatgaatgagtctggaatttccctgtttgaagcggctacatatgaggatttaattggcaaaaacatatacgatcagctgcatccttgcgatcacgaggatgtaaaagagagaatccaaaacattgccgagcaaaaaacagaatctgaaattgtcaagcaatcctggttcacctttcagaacagggtcatctatacggagatggtctgcattccaacgaccttttttggtgaagcggccgtccaggtcattcttcgggacatctcagagagaaaacaaacagaagaattgatgctgaaatcggaaaaattatcaatcgcagggcagctcgcggcgggaatcgcccatgagatccgcaaccctcttacagcgatcaaaggatttttacagctgatgaaaccgacaatggaaggcaacgaacattactttgatattgtgttttctgaactcagccgtatcgaattaatactcagtgaactgctcatgctggcgaaacctcagcaaaatgctgtcaaagaatatttgaacttgaaaaaattaattggtgaggtttcagccctgttagaaacgcaggcgaatttaaatggcatttttatcagaacaagttatgaaaaagacagcatttatataaacggggatcaaaaccaattaaagcaggtattcattaatttaatcaaaaatgcagttgaatcaatgcctgatgggggaacagtagacattatcataaccgaagatgagcattctgttcatgttactgtcaaagacgaaggggaaggtatacctgaaaaggtactaaaccggattggagagccatttttaacaacaaaagaaaaaggtacggggcttggattaatggtgacatttaatatcattgaaaaccatcagggagttatacatgtggacagccatcctgaaaaaggcacagcgtttaaaatttcatttccaaaaaaataaaacaacggcttaaacgccgttgtttatcgtctgcattgcttcacgtttttttaatacaaataattctaaacggttcaggccttctctcagcgtgtccagcgagtacgcaaaagacaatcttacatatccttcaccatatgttgagaacgagctgcccggcacgagtgccacaccagcgtcttccaaaagagccatactaaaatcaaatgaagtcattccaaatgatttaatagaagggaagatataaaacgcaccggacggtttaactacgtcaagtcccatagaaacaagacggtcataaacatagtcgagacgttttttgtattgttctctcataattagtgcatcgtcaaagccgtttgtgacagcttcaagcgcggctttttgagaaatggatgaggcacatgacacattgtattgatgaacctttaaaatgtgctttgcaatgtctttcggtgcgaataaaaatccaattctccaaccggtcatgctgtgtgattttgacaacccgttaatgacaatcgtttgatcccgcaaataggttgcgatggagtaatgcggtctgtcatatgttaattcactgtatatttcatcagacaatacgaagacatttctgccttttaagagagctgcgatgcttttcagttcttcttcagataaagtcacgccggtaggatttgacggataaggaagcacgacacacttggtgttggatgtcagagcatcttcaatcagccgggcggtaagcttaaagccgtgtgacgtagtatcaacaatgacaggcttggccccgcacaaattgataataggttcatagcctggataaataggtcctggcataatgacttcatcaccgggagataaaatcgtccggaatgcagcatcaagggcttggcttgcgcctgttgtgatgataatttctgattcagcatcatagttgaaatccgcttttttcttcatataaagctgaacagcttgtctcagctccaggtagccggcattcggagtatatgacgtcacgttttcatcaatggctttttttgcggcagctttcacatgatgcggtgtgaaaaaatcaggctggccgattgtaagtgaaatgacgtcttcgtgttgggctacaagattcgagaatttgcgtattcctgaaatttcgatctctcttgctttcggattcagcaaatgttccataattcatcaccttaacaaatataatgagtttatcctattttaccactagctgatcatttgtcacctttttaactgatatatttcgattgtatgcgccttttttctaaacatacctttcttttcagaaaaaaagaagacaaccagcgatttgattgtctttattgtatcatgttctattattgtttatatgtgccaatttcattaatagccataatcaaaatgaaggtcttcgtgccaaattagatacggaggatgctcttcttgaaggtcagctgattctttcttcatattcaggtaagtttcttcactgatatcctctaaaacagtcatttcgttttctttaaatattactaaggtacccattatttacacccttctttggaaaaatccttgactattttatcactgttagttggaaagtcaatggttattaggaaaaaagtttcttttttgaggaacgcggcttgttgccttcggaattcgattttgaagagctgccattcactttttacaaattacgccgatatatacagtacaatactgaatgcgaatagcgagggattgaattgtcgttacaacaatacgaaattttattggattctggtacaaatgaattagaaattgtgaagtttggcgtgggtgaaaatgctttcggaattaacgtcatgaaggtaagagaaattattcagcctgtcgaggtgacatcagtgcctcactcccatcagcatgtagaaggaatgattaaactcagaggagaaatcctccctgtgatcagtctcttctcattttttggagtagagcctgaaggatcaaaagatgagaaatatatcgtgactgaatttaataaacggaaaattgtttttcatgtcggctgtgtttctcaaattcacagagtatcctgggaagcgattgaaaagccgacatcgttaaatcaaggaatggagcggcaccttaccgggattattaagctcgaagacctgatgatctttttgcctgactatgaaaaaattatttatgacattgaatcagattcaggtgtagacacgtataatatgcataccgagggcttcgatgaaagaagaactgataaaaagcttatcattgtagaggactcaccgcttttgatgcgcctcttgcaggatgaactaaaagaagcagggtacaacaatatcgcttcgtttgaaaatggaaaagaggcatatgaatacattatgaaccttgctgaaaacgaaactgatttatcagaacagattgatatgatcatcactgatattgaaatgccaaaaatggacggacacaggctcacaaagctgctgaaggaaaatccgaaaagctcagatgtgccggttatgattttctcatcgttaattacggatgatctgcgtcaccgcggcgaagttgtaggcgcagatgagcaaatcagcaagcctgagatcagtgatttgattaaaaaagtggatacgtatgttattgaataaataaaaacagccgttgccagaaagaggcacggctgtttttattttaaaagtaactctcgccaagttttttaaagaccggtttatggtaagctggctgctggcgatttggcactagcggcttttctttcatgccgacatattcttgcaataggtgtttcgcttttgttaaagacatttgagctttaggatttcggtacgattgattaagtgtacctaaatgcggaagatgttcgaagtcttctttagttggaggcatgtgaaaatagtagtctccgattgagataagcacgtccgattgctgttggctgaaccttggattttttgaaaaatgaagccctattttctttcctttaccttctttgacaagcttttgcaaagcccgttttttcagcagatataggtatttagggttgggggcggtttttgcatggcggttcacagtgtaaactgcttttgaaagattttctacggttggctgcagatctttcgtatatgcatggtcgtccattatttctctcctttgctcttatcaatttctatatgtttagattatacttttttaaagttgaaatgcaaatattgaatgtaaaaatgcgcttttttctaagaaaaaaagcgcatttttaacctgcattatacagatcttgccttctttttcggctgttcttgaaatgcttcctgaacattcacttccacagcctgagcactgtattttggcagtgcaataaaataaaaaataaaaacgagcaggataataacacccatcccgtaataaagataatcaatgtttgaaacaaacttagggaataacagtgcgactaagccgagtgtcaaagactgtgcaaacatcataaaagggtcctgcatgccgcttacacgtcccatcagttttggatgaacaatttttggcatccaccctccgattgcaatgttgatcggtccgatgcacattcccagtgcaaaagctgccgcgtaatacacccataaaatattggtgtagccgaggacgaagatcagcaaacctgcaatgaaaatcggtatcgacattaaaaagtgcggcttcacttttttagagatgatcgtgccgattacgctgcctgccagcagcccaaacccgagtgcgatcgtaaatacagacgtatgccactcataacggtcaggcgccaatccatatttcattgtaaacatcggcaaaacggcgaatcctccattgacaaatccaaaaatgaagaagccaaaaataagagatgccagcaatttgttttttaaaatatagaggatgccttctctaaagtcatttattgaatccttaacagaagtctttctccagctgaatgcaccgtttggctgtcgggcttcttttggaatccggcagctgcggatcagcagcccggaaatgataaagctgacaaaatcaagaataatggcgccttcaataccgatggtgttgtacataaacgcgcctataccgaccccaaacaccataaaaatgctaaaaagcatctgattaagtcctgccgctttcacataatgctccttcggcagaatggcttgtaccaaactgttttctgccggaaagaaaaactttgttacagcgcttctgataaataagatacaaaaaacaagaggaatattgccggtaaataaagtgaaaaaaagcacgacagtcaggcctgctctgatccaatcacaattttctgccaccttttttctgtcaaaccggtccgcgacgactcccacgatcagaaatacaaatatggtcggaagagaatacatcagctccgccaaggtcgtatatgaaggctggctgctgaatcggtccagcaaaaaaaaagcaaaggccatgttgcctactgtcgtgcccatttgagaagcgagtgctgcgaaaaatagacgaacaaaattacgatttttaaatatatccataaaaacgctccttaccctaaaggtcccactttatcatattataaaccgcctgtttttgaaacaaataagaaaacattaccggttaatcgtgactctcgttccgtttggcacaattgaagcaagttcgatcacgtctttgttatgcatgcgaatgcagcctttagaaacagccttaccaatcgaagcgggattattcgtcccatgtattccgtagtgctgctttgaaaggctcagccaataagcgccaaatgggccgccgggattgcgctggcggttaataatgtaaaactcgccagtaggcgtttgcgttagtattttaccaacggcgatgggataggttttcattacccgattatttaggaacagcgtaagggtcttcgctccgattgagactgcgatatgatacggaattgtataagggtccggcagtccggggatgactatggactgtcctgcggtgagccctgcctgcagtgacggattagcctggagtaatgcagccgtgctgattctgaaatcagccgcgatgctgttcagtgtatcaccttgcttcacctggtacgtaagcagtttcctcatcctccttttttacttataagtattgatggggagcccatcctgctacattaatttgctttttaaggtgaagacagtgatttcaggcttggccagaaaccgcaaaggcagcctggtcatcccgaggcctcggtttacgtaaatatgagtgctgcccgtttgatacattccctctgtgtagacttttccatatggaggcgtaataatcggtccgtaaaaaggcagctgaatctggccgccgtgtgtatggccggaaagctgaaggttcacgggataatctgttgttttcaaggccgcatcaggttcatggacgagaagaatggaaaaaagtctgtcgctcagccttgaaagggtgccttcataatctgggtttcccagcattaagtcatcaagcgaagcaatctcgattttgctgccatctgcgagtgacaatgtttgatagccattgcgatataccgtgaaacctccggccgtcatcaggcttttgtaaacggcagttccatagcctccgtgatcatgattgccgtaaatacaaagcttgccgaagggagcattaagctttctcaataatggaatgactgcctggtggtgctgatacgtatcaggattatcaataatatcacctgtaaaaacaatgagatcaggtttagattcattaattgtaagaatgacagtttttaaatcttcgagagtaaagtaatcactcaagtgtgcatcgctgaactgcacgattttaaaaccgtcaaatccgtgcgggatgagagagctttttattgtgtgttcggttgtctcgatcatatgcggctcgagatacctggcatagccatatcccccgccggccgttaaagccccggcagcaagagcgccgaacattccttttagaaattgtcttctggacatctttttcatttcaaaccaacctttaatagagtttttctattatatcatctgtatctgataaaaatctcatatgagcatgtgctgacagaggcagggatataatgatagaatattattgaatgaatactcattcacaattggagggataaacatggaaaaaaaggcggtaattattaccggcgggtcaagcggaatgggaaaagcgatggcaaaaaaacaggctgaattagggtggcacgttatggtgacagggaggaaccatgaagcacttgaggaaacaaaaaaagaaattgagacctttgaggggcaggtcgcttgttttcaaatggatgtccgttccgattccgccgcttcagacatgataaaagaagcgataaaagcctttggccagcttgacgcgctaattaacaacgcggccggaaactttatttgtccggcagaaaagctgacgcccaatggatggaaagccgttattgagattgttttaaacggcacatttttttgcagccaagcagcggcaaggcattggattgaccagaagcagcagggtgtcattttaaatatggcagccacgtacgcttggggagcgggagcgggggtcgttcattccgctgcagccaaagcgggggtattgtcattgacaagaacgctggccgttgaatgggggagcaaatacggcattcgcacaaacgcgatagcccccggaccgattgaacgaacaggcggtgcggagaagctatttgaatcggaaaaagggatggcccgcacgatgaacagtgtgccgctcggccgattgggcacaccggaggaaatcgccgctttggcagcgtttttgctttctgatgaatcatcctatataaacggggattgtatcacaatggacggagggcaatggctgaatccttatccgttttaaagaatattaatctttggattcaatgtggtataatcagacaaagatagagaagcaggtgataacatgttggatccacttgatattttaacgaacattgatgatgtccttccatattaccaggcgatttttagtgccgaggagcagaaggttgtcggatatgaggtgcttggacgaattttggcagattcagaaatccaaagtctcgggcccttctttttagatgcggggatacccgaagaatataaattagaggttgataacagaattatccgccaggctcttgaccgctttttagagtcggattctgatctgctgatttttatgaatcaggatgccaatctgctgatgctggatcatggtgaaagctttctggagcttctgaaagaatatgaagcgaagggaatcgaactccaccgttttgtgcttgaaattacagagcacaattttgaaggggatattgagcagctctaccatatgcttgcatactatcgtacatacggaattaaaatcgcagttgacaacatcggaaaagaaagcagcaacttggacagaatcgcgctgctctcaccagatctgttaaaaatcgatttgcaggcgctgaaagtgtcacagccgtcaccgtcatatgagcatgtgctgtacagcatatctttattagcaagaaaaatcggtgcggcgctgctgtatgaagacattgaggcgaacttccagcttcagtacgcctggagaaacggaggccgctattttcagggctattacttggtgtctccatctgaaacgtttctagagagagatgtattgaaacaaagacttaaaactgaatttcaccaatttatcacacatgagaaaaagaaactggagaccgtctatgagcactctgaacagttttacaaacgagtgcatcaggctgtgacctctttgagaaaaaacaatctgtcttctgatgatgactttattaaaaagctggcggaagagctgacagattgcagcttcaggatttacatgtgtgatgaagaaggcgatcagctgacgggaaatgtgtttaagcaagatggagaatggatttatcagccggaatatgcggaaaagaactggagttggcgcccttattttctggagaacattatgagaatgagaaatctcagaaaaggttttttcagtgatctgtacagtgatttggaaacaggtgaaatgatcagaacgttttcatatccgatggatgatcagatgtatttatttatagacttgccttattcttatttatatgagcaggacggactgatttaacggctgaaaggccgttttttttatgaaatgaaaaaaatatcaaaaaacgattgacattgatactgagaatcattatcatttaattatagagagaagctactctctgttccccaacccctctatcagatcaagatccgaaaaaacttggcgctacccccgccaagttttttatttgtcaaagcataggacaatccaatgaaacaataaacctaactagtggtaaacgtttaacactgggagaaacattcagtgccgaacacccctgacactgctgcacgggtgaggaggaaaattcgttctgaaatgtttatttcagttccgttgtttgcctctatccagcatgactcccattgattatggccacgcgggacttcaccataacattcaaaagaaggttttgacaaagttgcaaaaaggcattcttaatgctgccaaagattcgaaaaaaattataattgtgtgcatgacattcaaaaaaagcctcaaactaaagaaaaatcgtttttttcactttttttctttgcttaaattcagcagtgaaaatgccatcctgtccgactttatggtatgatgctcaatagaacttgtattataataaatacttgttgatttgaagttgctttttgaaaggagtctttttttagaatgtcacaattaatgggtatcatcacacggctgcaaagtctgcaagaaacagcggaagcggctaacgagccaatgcagcgttatttcgaagtgaatggtgagaaaatatgcagtgttaaatatttcgaaaaaaatcaaacgtttgaactgacggttttccaaaagggtgaaaaacctaacacgtatccgtttgataatatcgacatggtttccatcgaaatctttgaacttcttcagtaagattcctgaaatagggggaacaagcttccgcctttgcaaaagtaatcgaaataaacggtaaggaacatacttgtttcatggttgtaaatccttgaaaaggagtgtcgtgatggctgattcttttctgttttataatctttcagaagcacagatgacctttcaagatgtgatggaacggcttaaagcctttgttcaaaaggacccccgttcttcttatgtgttatcgatcggaaccgattcacaggtttaccgcgattacacaaagtttattaccgcattgcatttgcatcgtacaggcaagggagcttggggctgcttaaaaaatcatacagtcgacagacccatacatagccttcgggagaagatttcgttagaaacggcgtacagccaagaaacggccgctcatattcttgatggacacttaatggatattaccgatctgctcctgccctttaccggtgagggggcggatcttacctttgaagttcacttggatattgggaaaaaagggcttacaaaagatctgatccaagaaatgactggacgtattacctccatggggattgaggccaaaataaagccggattcatacactgccttcagctatgcaaatcgtttcacaaaataatttggctgaaaaagccaaggtaaatgtcgaattatgcggttgacgtttgttatctgattacttattctagcggtagagctgaaagtaagttgtcttgctttcagaggtattcagtataaaacagggggcctgattgcgaatgagtcttatcggtgaacgatttacagaagaagaacaaaaacttctgctgaatatcctgatcaaccatgagtatgccatcgagctattaagcagtgagatcaacgatatagagacagggaccaaaaacgttgacggaaccacctacaaaaaacttgtaacgctatacgaccgatttcgatttgaaaattaatgggacaccctataattgatactccacaaagagtatcttttttattgaaaggaaacttttcgacaaatactgataaagtttatattattgcaatatagggaatgtattgatgatgaaaatgaaaaggggtcgaaaacatgataagcttacaatcagatcaacttcttgaggcaacagtcggacaatttatgattgaggcggacaaagtagcgcacgtgcaagtcggaaataaccttgagcacgcattattagtattgacaaaaaccggatacacagccatcccggttctggatccttcctaccgtttacatggcttaatcgggacaaatatgatcatgaacagtatttttggacttgagcgaattgagtttgaaaagcttgaccaaatcactgttgaggaagtcatgctgaccgacattccgcgccttcatatcaatgatccgattatgaagggattcggcatggtcattaataatggatttgtctgtgttgaaaatgacgagcaggtatttgaagggatttttacgagaagagtcgttttaaaggaattgaataagcatatacgctcgttgaataagtaggctgtacggcctatttttattatatagccagagcgaaaaaaagaaagcgcatacataatttaaacgagaatagggcttgaataagaaactaagattttattagaatgggagataagaaaaacttattgataacaaaaaggaggacgacatgcagcttcaagagcttcatatgctcgtagttttagctgaggaattaaatatgagaaaggcggcagaacggctttttgtatctcagccggctttatctcagcgcttacaaaccattgaaaaggcgtggggaacaaaaatctttttaagatcccaaaaaggattaacggtaacgcccgccggtgagaaaatcattcagtttgcgaatgatgtgacattagagcaggaaagaataagagaaaatattgacgagcttgaaggtgaaattcacggcacattgaagcttgccgtcgcctccataatcggtcagcattggctccctaaagtcctgaagacgtatgttgaaaagtatccgaatgcaaagatctcgctcataaccgggtggagcagcgaaatgctgaaaagcttgtatgaggatcaggttcatatcggcattataagaggcaaccctgagtggaaggggcgcaaagattacttaatgacagatcatctgtatttagtggatactgaaatttcctgcatcgaagatattgcccatacagaacggccgtttatccagtttaaaagtgacagcacttattttcaggaaattcagcactggtggcatcaaaaatttaaaacgtcgccgaaacagacgatattggttgatcagattgaaacgtgcaaacagatggcactgcacggaatcggttatgccattttgccgtctgttacccttcaaaatgaagataaagtgaataaaatgcctcttttagacatgaaagggcatccgatcggtcgggatacatggttattaggttatgagcctgcctttgaactgaaacaagttcaagcttttgtacaagtgataaaggatatgctggaccaggaaaatccattttaaagacagcgaggtgctgtctttttttttatttatctgttgacaatgaaaatcattatcatttaaagtgatacatatgatattgaaaatcattatcaattaatggggtgataacatggctaaagccttgattacatatgccagcatgtcaggaaatacagaagacattgccttcataataaaagatacgcttcaggaatatgagttggatatcgattgtgtcgagatagatgatatggatgtgtcttgcttaacctcctatgattatgtactgattggcacctatacatggggggacggcgatttgccctacgaagcggaggattttttcgaagaggtcaaacagcttcagcttcatggtttaaaaacagcctgcttcgggtctggcgattattcttatccaaagttttgcgaagcggtgaatttgttcaatgccatgctgcaagaggcgggagctgctgtttaccaggaaacactaaaaattgaattagcgcctgaaacggatgaagatgtggaaagctgccgagcgtttgcgagaggttttcttgcatgggcagattatatgaacaaggaaaaaagccatgtttcataaaggagcaactgctgttacggcatcggcgttttctggatattttgtggcggtacaaagagaaggcatttttcattattctttggagcagggctggagaaagctttttcgtttgaaaagtaagatacactgtatcagctacatagggccttacttatttggtgttggtgaaaagggaacagtcattcgttcggctgatgaagggaaaacctggacgatgtcgagctttccgacaaatgcaacagtgtgggcgattaccggcagaaacaacgggtttgtctgcgcccacggtaagcattgtatttatgtatcggatgattttggtgtctcatggcgcgtagccaaaccttttgccgaatttcataatccccctgttatccggtcgctatgccttcacgggggcaatctttttattggcacgcaaatacacgcatattttggcggcatttgggcttacgacattaagcgtgacactgtccaaattgtcaaaaaagaaaaaaaacggatgacggcatccatgctcgtgttcaatgaaaattggctggtggcggcgatgggttctgtgaaaggaaagcacggtgctgtcactgtacggaatcttttgaatggtgaagaattcaccatacaatccagtatgatcagaaatgaagaatcatttcttgatctttcagaggatgatggcattatatatgtcactacaacacaagatgaaaatggtttttcgagaatttaccaggttgatctcgaagcccgatcgttaaaatggttcgataccattaaggggcatggatggagagtggccaatcagaaagagaatttcttttgcgcaggcttgtatgaatgtaaatttgtccagccgtacgaagtttcagcaatgattcattagaggaggaacaaggaattggcgaagattttgctcgtttatgcaacaatgtcaggcaacactgaagcaatggcagatttgattgaaaaggggctacaggaggcggaagcagaagtagaccgtttcgaagcaatggatattgatgatgcccagctgtttaccgattatgaccatatcataatgggaacctatacgtggggagacggagatctgcctgatgaatttttagatctggctgaagacatggatgagattgatttttccggcaaaacatgcgctgtatttggttccggtgatacagcatatgaatttttctgcggagcggttgatacgctagaggcaaaaataaaagaacgcggtggagacattgtgctgccttcggtaaaaatcgaaaataatccagaaggtgaagaagaggaagaattaataaacttcgggagacaattcgcaaagaaaagcgggtgcgctgtctgatcactcactgggaactgctaaaacggctgttcctttttttcttgtctttgtatctttcctttgatacagtaatgaggtagaaaatcaggaggaggactatacatatgaaaatgatggacgcaaatgaaattatttcatttattcaaaatagtacaaaatctacacctgtaaaggtttacgtgaaaggtgagctggaaggaatcaatttcggtgaatctgcgaaagcttttatcaacggaaacactggtgtcgttttcggtgaatggagcgaaatccaaacagcaatcgaagaaaaccaaagcaaaatcgaagactatgtggttgaaaatgaccgccgcaattctgcgatcccaatgcttgatcttaaaaacatcaaagcgcgtatcgagccgggcgcgatcatccgcgaccaagttgaaatcggtgataacgcagtcatcatgatgggtgcttctattaatatcggttcagtcatcggcgaaggcacaatgattgatatgaacgttgtgcttggcggacgagctactgtcggaaaaaactgccatatcggcgcgggttctgtacttgcgggcgttattgagccgccatccgctaaaccggttgtgattgaagacgacgtcgtaatcggcgcaaatgctgttgtgcttgaaggtgtaacagtaggtaaaggagctgttgttgctgcgggagcgatcgtggtaaacgacgttgagccatacactgtcgttgcaggcacaccagctaaaaaaatcaaagacattgatgaaaaaacaaaaggcaaaactgaaatcaagcaggaattacgccagctgtaaggaaaagtttgataaaaaaggcgtggataatatatccacgccttattcgtataggcaggaggaatagaaatgaagaaagaggagctcatcgcaattcgcagagatctgcatcgtataccggagcttggatttcaggagttcaaaacccagcagtatttattaaatgtcttggaacaatatccgcaagacagaattgaaattgagaaatggcgaacagggctttttgtaaaagtgaacgggacggcgccggaaaaaatgctggcgtacagagccgatatcgatgcgctttctatagaagagcaaactggtcttccattcgcatcagagcatcacggcaacatgcacgcctgcggtcacgatttgcatatgacgattgcactcggcattattgatcattttgttcaccacccagtcaaacatgatttgctttttctgtttcagccggcagaggaagggcctggcggtgcggaaccaatgcttgagagcgatgtattaaaaaagtggcagcctgatttcatcactgcgcttcatattgctccagagcttccggtaggcaccattgcgacaaaaagcggccttctatttgcgaatacatcagagctagtcatcgatctggaaggcaaagggggacatgcggcatatccgcatttggctgaggatatggttgtagcagcaagtacacttgtcacccagctgcaaacgattatctctagaaacacagatccgctagacagtgctgttattacagttggtaccattaccggaggctcggcacaaaatatcattgcagaaacggcccacctggaaggcacgatccgcacgctttctgaagaatcgatgaaacaagtaaaggaacggattgaagatgtagtgaaaggaatcgaaatcggattccgctgcaaaggaaaagtgacatatccgtctgtatatcaccaagtttacaatacgagcggattaacagaagaatttatgtcttttgttgctgaacatcaactggcgacagtaattgaagcaaaagaagcaatgactggagaggattttggctacatgctgaaaaaatatcccggcttcatgttctggctcggcgctgattctgaacatgggcttcatcatgctaagctgaatcccgatgaaaatgcgatagaaacagcggttaatgtcatgacaggttatttttctgtttatgccaattaagcacaaatgaaagaataaaattccataaaatgagcactctagtaaacggaggtgttcaaaaatggctaaaaaaattggaattgaacaatcgttatcagatgtagaagctgctttaaaagaaaaaggatatgacgttgtaatgatgaaaagccctgctgatgctcaaggctgtgactgctgtgtcgtaacaggtcttgataataatgtgcaagggatagccgatacggtaacacaagcacctgtcattacagcttccgggatgacggctgaagaaatttgcagcgaagttgaaagcagaattcagtaatataaaaaccgaagcaaaaagcttcggttcttttatttattctgtttctttagggaaagcgcggtcgaacgcgttctttatttcttttctcaacactcgttcgactcgccactgttccatattttctgttttggcaatgaccctgattacaatttcggaagtccccagttcttgaatgccgatgacatttgggccttcttttatttgtggaagagccgctgcagtttcatcacaaacctgctgtaaaatatgaatcatttcatcaatatttctttcagccggcactttaatgtcaacaagagcctgcatggtaccacgagaatgattgctcacgtttgtgatgtttctgttggggatgtaatgcagtgttccgtcaaagctgcggatttgagttgtccttaagccaacctgctcgacaattccgtcaaaggtggaaacggtaatataatctccgacatccaattgtttctcaagcaaaataaaaaaacctgtcacgatatcactgacaagcccttgggcgccaaatccgacagccaggccgacgattcctgcccccgctaaaagagcgcttggatcataatgaaacaaatctagaaccatgacgaaaaatatgaaaatcaatgtataagcaaatatgttaagagtcaggcttcggagcgtatgtgcacgtccgatagacaagctattctgctcctcgaattttgcaaacagatgtttaatgattttcatgcctaatgatcgaacgataaaatagagcaatatcataatggcgagtttaatgagcagaacaccggcatttgtaatcagtcccgcccaatcatattgtttaataaagtccatgttgagctccttttctaattgattgctgcacattgagactagttaccctgtacatgaccatgttaaacgttttattcaaaaatgtcgaagccaaagacatacatgatttgttaaaaattgactcaggaaatctgcttttatataatggcattgcaatataactaaaaatggttaatcaccctttattttcatgcgattttgacctttaagccaaacaataaattggagggatacatatggcagaacgtatggtaggtaaacaagctcctcgttttgaaatggaagcagtccttgcaagcaaagaattcggcaaagtaagtcttgaggaaaacatgaaaaacgacaaatggacagtgctgttcttctatccaatggatttcacttttgtttgtccgacagaaattacagcaatgtctgaccgctatgacgagttcgaagatcttgatgcagaagtcatcggggtttcaactgataccatccatactcatttagcttggatcaatacagaccgcaaagaaaacggtcttggccagctgaaatacccgcttgctgctgatacaaaccatgaggtatcccgggaatatggcgttttaatcgaagaagaaggtgtggctttgcgcggattgtttattattaatcctgaaggggagcttcaatatcaaactgttttccataacaatattgggcgtgatgttgatgaaacgcttcgtgttctccaggcgctgcaaactggcggactctgtccggctaactggaaaccaggccaaaaaacactttaattctttccaagaacgaaaagcggtctagcatattcgttaggccactctgttaaataggagggaaaaagcaatgaaattacgtcagtccatgccggaattgacgggagaaaaagcttggttaaatggtgaagtgacgagagagcaattgattggggaaaagccgacgcttattcatttctggtccatcagctgccacttgtgcaaagaagcgatgccgcaagtgaatgaatttcgtgataaatatcaagatcagctgaatgttgtagctgtacacatgccccgttccgaagatgatcttgaccttggtaaaattaaagaaacagctgctgaacacgatatcactcagccgatttttgttgacagtgaccatgctttaaccgatgcatttgaaaatgaatatgtacctgcatattatgtgtttgataaaacaggacagctccgtcacttccaagccggcgggagcggtatgaaaatgcttgaaaaacgtgtgaaccgcgttctggctgaaacggaataggtatctgactaaatagtatttcctaaaaacctgatcacatcaggttttttatttgtgcaaaaagcaatggaagaagagtaagaagcttatttttccaaatttgggtataggaattgatggtttgtttgattgatacgctagaaaacacagctaatttttgatgtttttcctcaattttagataaatctcatatctcataactcgaaaattgtagatattacactaaatttctttaaagaagtaagtaaaatatatattttcaacattataccaaataaactagaaagccccttaatcccttgagaataaaggactcttttgaaaaataaaacattttcagaaaataaggaatttttcatagagtaaatataatagtaaaatgctaaaataatagttgataaaattacttttgtaatctaatatcttaattaaagatgttaattttgatagggggtacattgaggaatgtttaatgaaagagaagctttgcgcttgcggttagaacaattaaatgaagctgaagtgaaagtcattcgtgaatatcaaattgaacgtgataaaatatacgcaaaattaagagagctggacagaaatggaagcccttccgaaatcaaaaaggatttccgttctgaaaaaaaacctgactctctgccggttctcgctgagcttgcggctcaggaaatcagaagctatcagccgcaatcacagcagcagtctgttcagcctcagcttcaatctatttcctctcttcctgccggtataccagacggaacaacacgaagaagaagaggaacggcaagaccgggatcaaaagcagctaagctgcgtgaagctgctattaaaacattaaaacgccacaacgcggcgattaagagctcggagcttcaaaaagagattgaaaaagaaagcggtcttgaaatccctaatatgacaacgtttatgcaaagcttaattaaaatgtacccggaagtgaaaaagccatatcgcgggcagtacattttagagggtgaaatcgaatctgcagaatcagcaaatgaataaatataaagaaaaactgcttggcatcgctcaagcagtttttttattgaggttttttctgtgaaggtttgttttctttttcaagattaagcttatacacccacttttgataaggcttttcttcagcggctctgtttctcagctcttcgattgtatggctcttggcctggtctgatgattgggcgtgggcaagctgtttttggagcacatgtatctgtttggtgacatcttcaaggatggtctctacatgatatggctgcgcgtaggccgctggagcttcttcttccgttttttctttttgtttcgtgccgccatcaatatcggcaaaatgagaagcaatccaggcatcgctttcatcaagctgccgtttatacgatataatagtttcgtgaaataatttttctttcgttttttctatgtctagcagtctttctttcgtttctatgattcgatctttcatatgatcaacttctattttaatatgttttagctgatattctttttctaccatttgctcttttagacgcccgttttcggcttttatcaattcggcttgctgttttgcctgaagcagtgcattttgttcctgctcaatcgaggcttgaagttcgctgatccgtttatgaagatttttattttcttcttcgattttgactttcgcaatatgaagtttatgtttttcttcgatttcggctctgcgtttataggtttcagcagatagaagctcctgcaaaacaacgattttatcaagcagttcagctcttatttggtgcagggtttggctggtgtgggaggcatgtttttcttttgttgacatatgtgttaattcggcagacagctgctggagtttttctttcatatcggtattttctttgagcagtttgttatttttctgatgaaagtagcttgcttcaagttcagaaatcagcttatggcaccttgaaagctcggattttaaataaaggttctcctgagacacgtcgtggaaaaaaggacctgatcttttcattcgaaccatctccctcatgatgttaacactacaatatgcaaatactgaacagctattcctctttaataaacagacaagcagtagcgttgagcctttgcttttgctatgcttttaacgaaactagaggtgagatgatatgaagcatgtaaacgtactgctggcagggggagcctcgcggcgatttggagaaccgaaggcgtttgtcaaatggaagggcaggatgctttacgaatgcgctaaagaggcacttggagaacaaacggttatcatcagccgtcccgaatttattgatagatttcaagaaaacggtgaaaatgaagtgtatcaagatgctgagccatttcaaggcatggggccattggctggtatatataccgcttttaaaaagacagacggtgatctttatactgttctttcctgtgacacaccgctgatacaaagaaggacgatactggagctcaaacgtctgatgactgccggttcggacgcggtagtcccaatttcagacggacaagtgcagccattgattgcgatttaccacaaacgtatcatgccagttctatacgatcagctttctgagaagaggttgagaatatcagatttattaggcagaatttcggtttgttacgtacaggctgaaaatatcggagcaaacccggcagagtttatcaacattaatacacgtgatgattttagctgtttggaagaaaaatcgaactccctcaagcgggactgacggggcaataacatgataagatgacataaaagataaggagaacaggtttgatggaggaacgttattcacggcaaatcagatttaagcaaattggggaagagggtcagaaaagactggcagacagccatgtgctgattgtcggagcgggagcgctcggcactgcaggagctgaagggctttcgagagcgggagtcggtacgattaccattattgaccgtgactatgtggagtggagcaatcttcaaaggcagcagctttatacagaaagcgatgccaaactccgcatgccgaaagccatggctgccaaagagcatctatcagcgattaacagcgagatacatattgaggcgtatgttaccgaaggaacagccgaaacgcttgagccgctgattgaaaaagcagatgtcgtgatcgacgcgacagataattttgaaacccgcatgctgataaacgatcttgcccagaaaacaaagacaccttgggtctatggcgcctgtgtaagcagccagggaatgttcatgactgtcattcccggagaaaccccttgtctgtcttgtttgtttgagcaaattcctgtcggcggggcgacgtgtgatactgccggcattattccgcctgctgtgcatatcgtttcagcatatcagcaggctgaggcatttaagctgttaaccggccaaatagaagcaatacagcggggttttgtgacatttgatgtctggaacaattcgcatatgaagattaacgttaatcatgtacgccgtgaggattgcccatcttgcggagcaaatgcggtatatccttatcttcaggattggaatacaccaaaagctgctgtattatgcggccgtgatacagtgcaggtaaggtcagaatcattaaaaagaatcccgaaacaggaactcattaagcggctgaaaacaatcggcaaggtcgaggctaatgcgtttttgctgcatattttttacgaggatttcagaattgtcattttcaatgacggacgggcactggtgcatggaacaaatgatgtgaaagaagccaactccgtgttggcaagagtgattggactgtaacaacaggaggggtcagaatgctggagaaaagaacaccgataccggtagacgaggcagttcggcgtgtctgccattttcaaaaacaaggtgaaacagaatgggtggcgcttgaagacagccttcatcggtttttagccgaagatataactgcggatcaccacgtacctgcgtttgaccgttcgccatacgatggttttgctgtcagagcgtgcgatacggcagaagcttcacgtgaaaacccagttcggtttgaagttattgaccatattggagcaggagcagtatctgaaaaagaacttggcccgtttcaggccgtgcggattatgactggcgcgcaaatccctgaaggggcagatgcagtcgtcatgattgaactgactcaaacctttgaggagaatgggaagtcatttatgtctttaaaacgccgctttcagacgggggataatatttcaaaaacaggtgaggacgctcaaaaagggagtgttttactgacaaagggcacccgggtgacaccaggagtgacggctcttttggcaacattcggatacgcatctgtgcctgtcgtgagaaagcctgtagtcgggattatcgcaaccggtaccgaattgctgaatgtcagtgatccgctggaaccgggaaaaatccgcaacagcaatgcgagtatggtatatgcgcaagcgatagaagcaggcgcaacaccgctttatttagggaaaatctctgatgaattggataaaagctttgctgcagttaaagaagcgatgaaaaaggtggacttcctgatcacaactggaggtgtgtcagtcggtgactttgactttttgcctgcgatctatgaaaaactcggagcggacgtgctgtttaataaagttgccatgcgcccgggcagcgtgacaacggtggcgcatgcaaacgatatgctgctgtttggcctttcaggtaatccgtcggcatgctatgtcggttttgaactgtttgtcaaaccgataatccagacatggttgctcaatgaaacaccgcattcgatttgtgcggaagctgttttgaccaaggattttccgaagccgaacccatttacccgatttgttcgtgcgctcgtgcaccatcaggaagggaagctgttggcgacacccgttggcttagataagtcgagctctgtcacatcacttgcagatgccaatgcatttattatcctgccgggcggcacgcgaggctacgaatctggcagaacggttcaagtgctgctcatcagagaagagaatggaagtgaatggccttggtccgtcctttcccgatcgtccaagttgtaggatttcaaaacagcgggaaaacaacgtttattgagcgcattcttgaaaaagcctctgaacaaggagtctgtttgggctgcctgaagcatcatggtcacggcggtgaaccgcaagcgctcacggaaggaaaagacacggaccgttacaaggcggcaggtgctgatgtaacagcggtagaaggtgctggtgtgttacagctgactgcccgccgcaattgggatttggcacggctgatcgagttataccaatttctcgaaacagactgtcttctgattgaaggctttaaaaaagccccttatcctaaagtggtaattctaagtgaaaaggaagatctggaagcgctgcaagcagtaaatataatcgccatcatctatagaaaaaaagagcatatgacagagcatcagggattacccgtttttcatgcggatgatccggttgccgtggattttgtgctttcacagctgaagggggaatctgcataatggaacggtttgagattacgaaaacacccattaatactgaagacatcattaaaaaagtggagaaacgggaagcaggagccattacgacatttattggtacggttcgggaatggacaaacggaaaaagaacggttcggcttgaatatgaggcatatgaaccgatggccgtgcaaatgcttgctcaaatcggcgctgaaatcgaagaaaaatgggaaggtgcctcagctgcgatcacgcaccgtataggtgtgctcgatatcggtgaagcagcggtagtgattgctgtatcttctccccatcgaaaagccgcatatgaagccaatgagtatgcgattgaacgcattaaacagattgtgccgatttggaaaaaagaaatttgggaagacggtgagcaatggatcggcgaccagctagaaacaacagcttatccgaacggaaaaccagatctaagcgagggagaccagcatgattaaaattcttttatttgcaggactggctgaacaggccggtacacaagcaatagaaatagatgtggaacaagcaaccacagatgaaataaaagcgagtctaaaagaacaatacggtcttgaatctattgatacgtctatgattgccgttaacgaaagctatgtaaaagaaaatacctctgtatcttcgggtgacacggtagccgtcataccgccggtcagcgggggatgaaaaccggacggcatttcagccgtccggtttttctgtatttcattggcatatccccaagtatcctcagcatacaatgattttctgtaagcgtttattctacatatgttactccctataaagtaagagactcactccataattagactgaaattttgaaaaataatagaaatttatttcgggtatcgatatagtgaagatgataaatgttggaaaggtgctggatatggagacatttaaaagattaaaaatgtattattggccgtacagaaaagtgtttatgtggtcgcttctagccatgcttttgatgactgcaattactgtcgtttatccgattatcctgcaaattacgattgatgagatcgtgctgggacggcagtatcagcttgcggcgtgggtcagcttaggatttattgcggtaatggttttgaaaggaatggctaccttttttcatcagtatttaggtgatatgttcgggatcaaatccgtttatcggctgagaaatggtctgtatgaaaaactgcagcggctttctttttcttactatgataacgcgaaaacaggagatttgatgtccaggctgactgctgatgttgaagggcttcgttttttcttatcatacggtctcgctgagctcattcgcttcggcctgctggtagccatcagcctgtcggttatgttttactattctgttcctctcacgcttgtgacaatagctgttctgccatttctcgcggttgcggtataccggtttgacaaaagagtccatcccgccttcagaggcatccgcaaatcgtttgcgaaactcaatacaaaagttcaggaaaatatcagcggcattaatacggttaaatctctttccagggaagattttcagatcagcactttcaataaagccaatgcagaatacagggcgcagtatttacaaacatcatccatctggtctgcgtatttccctttaatggagttcattggtaacatttgtattgtagctcttctctcatacggcggttacttggttatgcaaaatcagctcaatcccggcgagcttgttgctttcttcagccttgtcaattatatgatgtggcccattatgaacttaggttttgtcatcaatatgttctctcaagcaaaagcgtcaggggaacgcctgctcgacattctggaaaaagaagaagacattacaggtcatcctcatgctttgcataaacaaaaattaaccggagatgtccatttcaaaaatgtttctcttgcatacggaaaagaacaaacaaacgcgctgtgcaatgtaagctttgaggcaaacagcgggaaggtaatcggactgttgggcccgacaggttcaggcaaaagctcagtgacacagcttctcaccagattttacagtcctgttagcggaatgattaccattgatcacaaaccaatcacagattattcgttaaaaacccttcgctccaatatcggggtcgtacttcaagaatccttcctgttttcatctacgattagatcaaatatttcgtatgggcggccggatgcctcaatggaagacgtcattgaagcggcaaaaagggcgcaggctcataactttattatggagcttcctgataggtatgacaccatgctgggagagaggggaatggggctttccggcggacagaaacagcgtattgccattgcgagagccatctgcttgaacccgagcattttaatattggatgatgccacaagcgcagtagatatgcaaacggagcacagcatacagcttgccttaaaagaagtcatgaaaaaccgcacaacctttatcgtcgctcaccgcatttcttcactgaaacacgctgatgaaattctcgtttttaataaaggacgcattcgtgaaaggggaacacatcatgagcttcttgaaaaaggcggctactataaaaagatttacgatttgcaataccgtgatgtcaaaatgattaatgagccgcatgaggtcggatagggaggggccaaatgaaacaagcgaaaaaacaggggattttagagcgtttctattactcttcagatgaaatcattgaaaagccgtttaactgggctcaaatgtggcggctgctgagctatgtcaaaccatatcgaaaaacaattttgccgctttcttttctcaccgtattaattggcactgctgtgaagcttgtgatccccattttgatcggcgtttatgttcttgatcaagcgattacaaggagaaactcggagctgctgattcagctcatttttattattagcggtttatatgtcctcaattacgccgccaatgtgttaagaattaggtggatgaatcagcttggccagcatgtcatttacgatttgcgacagcatttatttacccatgtgcagcgcttatcccatcgattttttgatcagcggtcggcgggatcgatcttagtcaggatcatgaatgatattaactctcttcaggagctctttacaagcggagtcatcaatttgttgaccgacttgctgcttctggccggcgtgattattattttgtttacgctgagccctgagctgactatagccatcatggtgacattgccgattatgttttttatttcaacaagtctcagaaaaaaaatacgccgatcctggcaaacggtacggctgaagcaatcgaagctcaactctcatctaaacgaaagcattcagggcatccgggtcacacaggcatttacgcaggaagaagaaaacatggcgtattttgacggtgtcaatcaggagaactacgaatcatggcgggaagcaactagaaaaaatgccatgttccgtccgcttgtagaaatgacgaatgcgattgggacggctgtcttgatttggtatggagccacactcatcatgaatgaaaccattacgattggcgtcttcgtttcttttgctttctatctgggaatgttttgggaacctatttcgagactgggtcaggtctataatcagctgttaatggggatggcatcatcagaacggatttttgagtttctggacgaacagccaaatgtcaaggagaagccgaatgccattcataatgaaaagataaatggggagatcagttttgaagaggttgaattttcgtatgatgaaaaacgaaaagccctttacgccgtttctttctctattccggcgggctcgacgcttgcgcttgtcgggcatacagggagcgggaagacgacgattgccaatttaatcagccgtttttatgatgcgaccggaggcaccattaaaatagacggtataccgattaaggatctttcccttgccagtctgcgctctcaaatcagcattgtcctgcaagatacatttattttctctgggaccatcatggaaaatattcgttttggaaggccaaatgcttcggatgaagaggtgatgaaagcgtcccaagcggtcggagcggatgagtttatttctgatttagcagaaggatacgcaacagaggtggaggaaagaggcagcgtactgtctgccggtcagcgtcagcttatttcctttgcaagagcattgctcgccgatccggctattatcatccttgacgaagcaacggcaagcattgatacagagacagaagtaaaaattcagcaagcgttaaaaacgcttctgaaagggcgtacagcagtgatgatcgctcacagattgtctacgatccgcgacgccgaccgcatcattgttcttgatcacggcaggaaaatagaagaagggaaccatgatcagctgctcgctaaaggaggcatttatgccgggcttgtgaaagcgcaatacagcacagcgatagaataatatgaaaagccttcaatattgaaggcttttggaaatttattagaaaaacatgaaactttttgatatccttcccgtactatttgttagatattctcaaggaggttttgaaatggaaacgaatgtagaaaaaaacagcggaacggcgactgaaaagccttcacttttaggagtaatcacaagtccgtccgttcaatttgaaagaataagagaaaggccggctgtatggggaccgcttttgattgttgcagcaattatcatcgtcggtgccgtgctgcaatcactcggtacggattatagtgagcttttgaaaagccaggatacgcaagggctatctgctgaacaaatggaaactgtcgcaacaataaccaaagttggcggaatggcaggcgctattatcggcggtatcgcagcattatttattgcccctcttatttattggctctgtgtaaaagtatcaggcggtgttacgacatataaaaaaatgctttctctcggtctgtttgtctctttgattagcagtctcggattattggttaatggaatcgttgcttttacgactgacgtgaatcctctttacagcacgacgtcactggcagggattatcccatctgacggggctcttgccagcgtgttaaatacctttgaaattttcagcatctggagctttgtattattagcaatcggacttcacaaaacgggaggcatctcaaaaaaagccgggtggatttcagcaatcattctattcggaattttagttgtattttcgcttttttcaggtttaatcaattctgtggcgggtgcataagctcatgaaaaaagtctggatcggaattggaatcgcagttatagtcgctctttttgttggaatcaatatataccggtctgccgctccgacaagcggcagcgccggcaaggagatacagacggggagcgttgaagaaaatgaaatctcatcaacggttatggttcctggcacgctaaaattttcaaatgaacagtatgtcttttatgaagcggataaagggacattagaagacattaaagtaaaggaaggcgataaagttaaaaagggcacggctttagtcacctatacaaatgagcagctgagcctggaaaaagaacagaaccagttaacgtctgaatccaaccggcttcaaattgaccaaattcaagaaaagttaaaagccttggacagcaaagaaagagaactggaaaaacaggtaggaaagaaagaagcagaaaaacaaatcgaatctgaacggacagagcttcaaatgcagaaaaaaacagcggagatcgaattaaaacaaaccgagcttcagcggcagtcacttgccaaccgggtgtcagatttagaagtgaaaagcgaaattgaaggcaccgttatttctgtcaaccaagaagcggcatccaaaaagtcagatattcaagagcctgtcatacatatcggcaacccaaaagaccttgtcgtctcagggaaattgtctgaatacgatacattgaaagtcaaaaaaggccagaaggtcacactcacttcagatgtaatacagggtaaaacatggaaaggcacggtttccgcagtcgggcttgttccggatcagcaggagagcgctgcggcacaaggaacagaacaggcggtccaatacccgcttcaagtgaaaataaaaggaaatcttccagaaggaaagccaggctttaaatttatcatgaatattgaaacagataaacggaaagcaaatacgcttccttcaaaggcagtcaaaaaagaagatgaccaatattatgtgtatacagtaaaagacggaaaagcaaagcgagttgatgtcaaaatcggcgaagtgacagatgacctgacagaaattaaagaggggcttacccaagatgatcaagtcattttgaatccatctgatcaggtgactgacggaatggaagtgaaatcctaaatgattcagctttctaatgtgcgaaaaagctaccagatcggaaaggaaacgtttgatgttctccattctattgatttggacattcatcaaggtgaatatgtctcgattatggggccgtcaggatcaggaaaatcgacgatcatgaatattatcggctgtcttgatcggccgacttccggtacatatcaattggacggcgaagacatttcttcatataaagataaagaactggcggcagtccgtaaccggtccatcggttttgtatttcagcaatttcagcttcttccgcggctgaacgcaaaaaaaaatgtcgagctgccgatgatttattccgggataggcaaaaaggaacgtcaagagcgggctgagagagcattggaaaaggtcgggttagccgatcgaatgctccacatgcccaacgagctgtcgggcgggcagaagcagcgggtggcgattgcgagggcgatcgtgaatgagccgaaattgattttagctgatgaaccgaccggcgcgctggatacgaaaacaagcgaggcgattatggatcagtttacagcattaaatgccgagggaacgacaatcgttctggttactcacgagcctgaagtagcagattgcacgaatcggatcgtcatggtgcgtgacggaaacattgttcctgccagctccggacaaaggagtgtgggagaatgagcctgttggaaaacatcagaatggctctaagctctgtccttgcccataaaatgcgttcgatcttaacgatgctcggcattatcattggtgtaggctctgtcattgttgtcgttgcggtaggacagggcggcgagcaaatgctgaagcagtcgatcagcggcccgggaaatactgcggagctgtactatatgcctagcgacgaggagcttgcaagcaacccgaatgccgcagctgaatctacgtttacagaaaacgatattaaaggtttaaaaggaatagaaggcattaaacaagtcgttgcttcgacttctgaaagtatgaaagcgcgttatcacgaagaagaaaccgatgctacggttaacggaataaatgatggatacatgaatgtcaattctttgaaaatcgaaagcggcagaacctttaccgacaatgactttctcgcggggaatagagtcggaatcatctctcaaaaaatggctaaagagctgtttgataaaacctcccctctaggtgaagttgtctggattaacggacagcccgttgaaattatcggcgtgctgaaaaaagtaacaggcttgctttctttcgatttaagtgaaatgtatgtgccatttaatatgatgaaatcctcttttggcacaagtgatttcagtaacgtatcattgcaggtcgaatcagcagacgacataaaatcggctggaaaagaagcggcacagctggtaaatgacaatcatggcacagaggattcgtatcaagtgatgaacatggaggagattgcggccggaattggcaaggtaacggcaattatgacgacgattatcggctcaattgcaggtatttcccttttggtcggcggaatcggtgtcatgaatatcatgctcgtatcagtcacagaacggacacgggaaattggaatcagaaaatccctcggtgcgacgaggggacagattctgactcagtttttaattgagtcagtcgtattgacgctgattggcggtctggtcgggattggtattggatacggaggggccgcgcttgtttcagccattgcgggctggccgtcactcatatcctggcaggttgtatgcgggggcgtgctgttcagtatgctcattggtgttattttcggcatgcttcctgcaaataaagctgcaaagcttgatcccattgaagcgctgcgttatgagtagcctcatgcaacatgcatgaggtttttttatgtttagtgatttctactatgaatataaaagacttttttcattaaaataagaagaaaatgtcgtacaattgtccttatttttgtcgaatttacagtttacaaaccctatagacatacgttaatatggagaaacgtgaaagattttgatagttattgaatgaatttgaatgattttagttgcctaaaccgaaaatagcgtttacaatgaaattgtattcaaaatgaatacgttttcattaggaggtgaagcatgctaactcctgaacggcatcaattgattattgatcaaatagaaaagcatgatgtggtaaagattcaagagcttataaatctgactaatgcttctgaatcaacaatcagaagagatttatcgacccttgaagaacgcggttttttaaagcgcgttcatggtggagcggccaagctttctgatatcagacttgaacccgatatgcttgaaaaatcatccaaaaaccttcacgataaattgaagattgctgaaaaagcagcttctcttttagaagaaggggattgcatttaccttgatgcaggcacgacgacattgcacatgattgattttatggataaaaccaaagatattgtcgttgtcacaaacggggtaatgcatatcgatgcattaataaggaaagaaatttctttttatctgcttggaggatacgtaaagcacagaacgggcgcgattattggaggcgcttcattgattgccatggaccagtacagatttgacaagagttttctggggacaaacggtgtccatacagaggctggatttacaacgccggaccctgatgaggcccttttaaaacagaaagcgatcaaacaggcaaaacacgcttacgtcttagcagacccttcgaagttcggagaaatttcattttcggcattcgccggaataggcgacgcaacaatcattacgactgacgctgaagagcttacattcgataattaccaagaaaaaactgtcgtaaaggtagtgaaaccatgatttacactgtaacacttaatccatctgtcgattatatagttcacgttgaagatttttctgtaggaggcctgaaccgttcttcgtatgataccaagtatccagggggcaaaggcatcaacgtatcgagactgctgaaaagacaccatgtggcgtctaaagcgctcggattcgtcggcggatttaccggagaatatatcaaaacatttttacgggaagaaaacctggaaacagctttttctgaagtaaaaggggatacccgtatcaatgtaaagctgaaaacgggtgatgaaactgaaattaacgggcagggaccgacaatttcggatgaagatttcaaagcctttttagaacagttccaatctttgcaagagggagatatcgttgttcttgcaggaagcattccatcttcactccctcacgatacttatgaaaaaatcgcagaggcctgcaaacagcagaacgcacgagttgttctggatatctcaggcgaggctcttttgaaagcaacagaaatgaaaccatttttgatgaagccaaatcatcatgagcttggagaaatgttcggcacggccattacatctgttgaggaagccgttccttatgggaaaaagcttgtagaacaaggcgctgaacatgtaatcgtatcaatggccggagacggagcgcttctgtttacgaacgaagctgtttattttgctaacgtgccaaaggggaaattggtaaactcagtcggagcaggggattccgttgttgcaggtttccttgccggaatttccaaacagctgccgcttgaagaagcattccgcttaggagttacttcaggcagtgctaccgcgttctctgaagaacttggaacagaagaatttgtccagcagcttcttcctgaagttaaggtcacacgtctatagaggaggaaacacaagtgaaaataactgagcttttaacgaagcatacgataaagcttaatattgagagcaaagaaaaagaaaatgttattgacgaaatggtcactgttcttgataaggcaggaaagttaaatgaccgacaagcctataaagaagccattttaaatcgcgaaagccaaagctccacgggtatcggtgaaggaatcgctatcccccatgcgaaaacggcaagcgttatcaacccggcgatcgcgttcggacgttcaaaagacggcgtcgattatgaatcattagacggccagccggctcacttagtgttcatgatcgcggcgactgaaggcgcaaacaacactcaccttgaagcattgtcaagactttcaacgctgttaatgcgtgaagaaatccgtaagcagctccttgaagctgagtctgaagatgccatcatcgacattattaatcagcacgataaagatgatgacgaagaggaagaggaagaagaagcggcaccagcacctgccggaaaagggaaaattttagcggttactgcatgcccgacaggtattgcccatacattcatggctgcggatgcccttaaagaaaaagcgaaagagcttggtgtggaaattaaggtcgaaacaaatgggtcaagcggcattaagcacaagctcactgcccaagaaatcgaagatgcacctgcaatcattgtcgcagcggacaagcaggttgaaatggaacgttttaaaggcaagcgcgtacttcaagttcctgtaacggcgggtatcagacgtccgcaagagcttatcgaaaaagcgatgaatcaagatgcgccgatttatcaaggcagcggcggcggttcagcagcttcaaacgatgatgaagaagcgaaaggcaagtctggaagcggtatcggaaacacgttttataagcacctgatgagcggtgtcagcaacatgcttccgttcgtagtcggcggcggtattctcgttgcgatttcattcttctggggaattcactctgctgatccgaatgatcctagctacaacacgtttgcagcagcattaaactttatcggcggcgacaatgcattaaaactgattgttgcagttctggccggtttcattgcgatgagtattgcagatcgtcctggttttgcgcctggtatggtcggcggatttatggctactcaagcgaatgctggattcttaggcggcttaattgccggattccttgccggttatgttgtgattttactgaaaaaagtatttacgtttatccctcagtcacttgatggattaaaacctgttttgatttacccgctgttcggtatttttatcactggcgtattaatgcaatttgtcgtcaatacacctgtagcggcatttatgaatttcttaacaaactggcttgaaagccttggtactggaaaccttgtgttaatgggtattatcttgggcggcatgatggcgatcgatatgggtggcccgcttaataaagcagcctttacgttcggtatcgccatgatcgatgcaggcaactatgcgcctcatgcagcaatcatggccggcggtatggttcctccgcttggtatcgcacttgcaacaaccattttcagaaacaaattcactcagcgtgaccgtgaagctggtattacatgctatttcatgggagctgctttcgtaacagagggagcgatcccatttgctgcggctgatccgcttcgcgtcataccagctgctgtagtcggtgcagctgttgccggcggattaactgaattcttccgagtaacgcttccggcgcctcatggaggagtattcgtagctttcattacaaaccatccgatgctttaccttttaagtatcgtgatcggtgctgtcgtgatggcaattatcctcggtatcgtcaaaaaacctgttacagaaaaataagaaaaaaagcgtccttggttcgaaaggacgctttttcttatccggccggcagggagcgcggttaagttatgtattttattcttttttatgataaagtaaaagaagagaaacaactgacatagcaattgtctaggaggaaacactttgaccgaggaaaaaaatacgaatactgagaaaacggcgaagaaaaaaaccaatacgtacctggaatggggtaaagcgattgtcatcgctgttctgctggctctcctgatccgtcactttttgtttgaaccgtatttagttgaaggttcatctatgtatcccacattacatgacggagaaaggctgtttgtgaataaaacagtcaactatatcggcgagctgaagcgcggagatatcgttattatcaacggtgaaacttctaaaatccattatgtaaaaagattgatcggaaagcctggagaaaccgttcaaatgaaggatgacacgctttatataaacggtaaaaaagtagccgagccttacttgtctaaaaacaagaaggaagcagaaaaacttggtgtcagtctgacaggagactttggaccggttaaggttccgaaaggcaaatactttgtcatgggagataaccggctgaattctatggacagccgaaacgggctgggactgatcgcggaagatcgaattgtcggcacatcgaagtttgtctttttcccgtttaacgaaatgcgtcaaacaaaataaaaacgccttgctggcctaggacagcaggcgtttttattttgaaaaagaagcgaccaatgcaatgcataaaaccgtgatgaacactgaaccgataatagctagcacactgaagaaaaggtgaacctgtttgttctcttttccgcgcttttctaaaagccgtttagaaaaaatgtgcgaaaatatgtaaataagggctatgcctatatataagccgatatctttggcggtaaagcctgttacggcaaggtaaaagcccgtaaaaaagatcagtaagcaatattcagtaagtgttaaaagcctcaacgtgttcctccatgagagtgtgtaattttccaggcggatgcattctctctctttaattgtaacacagctggctggtttgggtgtataagtgttttctctctgttttatcagggaatcatttctcttgccctgcattcatggtatacttttattgatgatagacatgatggaggataataaatgattgctgtaaataatgtaagcttgcggtttgcggatcgcaagttatttgaagatgttaatattaaatttaccccaggcaactgctatgggttaattggtgcaaacggtgccggtaaatcaacgtttctaaaggtgctgtcaggcgaaatcgagcctcagacaggcgacgtgcatatgagtcctggcgagcgtcttgccgtcttgaagcagaaccattttgagtacgaagagtatgaagtgctgaaagtggtcattatgggccacaaacgcctgtatgaagtcatgcaggagaaagacgctatttacatgaagcctgatttctcagatgaggatgggattcgtgctgctgagctagaaggtgaattcgcggaactgaacggttgggaagcggaaagtgaagctgcgatcctgttaaaaggccttggtatctcagaagatctgcacacaaaaaagatggcagacctcggcggttcggagaaggtaaaagttctcttggcacaggcattattcggcaagccggatgttctgctcctcgatgagccgacgaaccacttggaccttcaggcaatccagtggcttgaagagtttctgattaactttgaaaacacagttattgtcgtatcccatgaccgccacttcttaaataaagtatgtacgcacattgccgaccttgattttaacaaaattcaaatctatgtcggaaactatgatttctggtacgagtcaagccaactggcgttaaagctttctcaagaagcgaacaagaaaaaagaagagcagattaaacagcttcaagagtttgtcgctagattcagcgccaatgcgtctaaatctaagcaggctacatcaagaaagaaacttctcgaaaaaatcacgctggatgatattaaaccgtcttcccgccgctatccttatgttaacttcacgccggaacgggaaatcggaaatgatgttcttcgcgtggaaggcttaacaaaaacaatcgatggcgtaaaggtgcttgacaatgtcagctttattatgaatcgagaagataaaattgctttcactggccgaaacgaacttgctgttactacgctgtttaaaatcatttccggggaaatggaagctgacagcggaacgtttaaatggggtgttaccacatctcaagcgtattttccaaaagacaacagcgaatatttcgaaggcagtgatctggaccttgtagactggcttcgccaatattctccgcacgaccaaagtgagagctttttacgcggtttcttaggacgcatgctgttctctggagaagaagtccacaaaaaagcaaatgtactttctgggggagaaaaggtccgctgtatgctgtcgaaagcgatgctttctggcgccaatattttaattttggatgagccgactaaccatttagacctagagtccattacagcgctcaataacggcttaatcagctttaaaggcgctatgctgtttacttcccatgaccatcagtttgtgcagaccattgccaacagaattatagaaattacacctaacggcatcgtcgataagcaaatgagctatgacgagttccttgaaaatgctgatgtgcagaaaaaattgactgaactatacgccgaataaaaaagcagagatttttctctgctttttttgatacctaaatgtgaaaggagatcacaacatgaaatttttggttgtcggagcaggtggagtaggcgggtatattggcggacggctttcggagaaaggaaatgatgtgacatttctcgtgcgccaaaaacgagctgagcagcttaaagaaaccgggcttgtcatccatagtgaaaaagggaatgtatcatttcaacccaaactaatcagtgccggagaaacagggcaatttgatgtcgttatcattgcttctaaagcatactcgcttggtcaagtgttagaggatgtcaaaccacttatccatcaggaatctgtcattatccctttcttaaacgggtaccgccaatatgagcagctatttgcggcattttcaaaagaacaggtgctgggcggcctgtgttttatagaaagtgctttagacaacaaaggagaaattcatcatacgagcgcatcgcatcgttttgtatttggagaatggaacggcgagcgtacggagcggataagagcgcttgaagaggcattttcaggtgtgaaggctgaagtcatcattagcgggcatatcgagaaggacatttggaaaaagtatctctttattgcagcgcaagcggggatcacaacgttatttcaacgaccgcttggcccaatcctcgccacagaagccggacgtcacacggcccaaactcttattggggaaatttgcgctgttttacgaaaagaaggcgttccggctgatccggatcttgaggaagagagctttcgtacgatgaccaacatgtcttaccatatgaagtcctccatgcttcgggatatggaaaacggccaaacgactgaaggagaccacctgcatggatttttgcttgaaaaagcaaaacgtttatctctcgcagcaccagtattagaaaccgtttatgcgaatctgcaaatgtatgaagcagaaaaataaaaaaaggaggcggaaaagcctccttttatttacttaaaaagcccaatttccgtttctgaagataggctctcttttcccgtctgccgtaattccgtcaatattcatatccttagaaccgatcataaagtccacgtgtgtaatgctttcatttaggccttctttgacaagctcttcacgagacatctgctttccgccttcaatattaaaggcataggcgcttccgatcgccaaatgatttgacgcgttttcatcaaacagcgtgttatagaaaagaatgtttgattgtgatataggcgaatcgtaaggaacaagtgccacttcacctaaatagtgagaaccttcatctgtttccaccagttcttttaaaatatcctcacctttttcagctttaatgtcgactatacggccattttcaaacgtcagggtgaaattttcaataatatttccgccgtagcttaatggttttgtgcttgataccactccgtcaaccccgtctttttgcggcagcgtgaatacttcttctgtcggcatattggccataaactcatggccgctttcattcacgcttcccgcacctgcccaaacatgcttcctaggcagcttaattgttaaatcagttccttcagcttgataatgtaaggcagcgtaatgtctctcgttcaaatggtcaactttttcatgaagattttggtcatgattgatccacgcctgaaccgggttgtcttcatttacgcgtgtcgctttaaaaatttcttcccacagaaggtggatcgcttcctcctctgatttgccaggaaacaccttgtgagcccagcctgctgatgccgcacctacgacagtccagctgactttgtctgattgaatatattgtctgtatgtatgcaatgctttgcctgctgctttttggaatgccgcaatccgtttggaatctataccttttagcaagtctgggtttgacgacacaacagaaatgaaagcagctccatttttggcaagctcttctctgccttttgcttcccattcaggatattcttcaaatgctttaaacggcgcaagttcgtattttaatttggctacttcgtcatcctgccaattcacggtgacgttttttgcgcccttttcatatgcgtgttttacaattaaacggacaaaatcccgaacgtctgttgaagcatttacgactacatactggcctttttggacattaacgccgacttctaccgccagctgtgcatatgtatttaatttctgtgaaaatgaatccatgaatcattcctccaagcttttttctcatcatatcaaatatgatcctataaaggaaagaaggagcccaaagtgaaaaacccaaaacgacacgtcttgggtttttcaatattatggatgattcagttttacagtgccgcctgcaggcgaatggggcatatttgccaaagaaatgctcatgcctccaagaataattccgcttaaaatggctgcgatcgctactcttcttcctaaatctcttagcatctgtttcctccttaacgtttctccatttcccacaatatgaaggaagtgaggaaaaaagaagcaagaaatttgccgcgtgtgagaattttgcgggtaaagactatttaattgccttttgcagcttatcaatcacttctaaagaacggcctgtgccgattgctacagattcaagcgggttttgcgccacgtgtacaggcacgacaatctcttctgtgagccattctttaattccattaaggagcgcaccgccgcctgttaaaataacgccgcgatcaacaatatctccgctcaattcaggcggacagtcctcaagtgtcgctctgatggcttcaagaatatgcaggagggattcacgcattgcatcttgaatttcgttggattgaagcataatggtttttggaagacctgtcacgaggtcacgtccccgaatttccattgcctctggtatatgttcaatcagagcatggccaattttcatttttacctgctcagctgtgcgttcgccgatcagcaaattgtattttttacggacgaaagaaacgatatcctcatcaagctggtctccgccgatcctgatagaatggcaggaaacaacgccaccgaaggaaataatagcgacctctgtcgtccctccgccgatatctactaccacattggcaaccggctcatcaaccggtaaatccgctccgatggcggctgcaactggctcttcgattaaatgaacgtttttcgcgccgcaatttttcaccgcatcactgatggcgcggcgttctactgctgttgagcctgatggtgtgcaaacgactacgttcggttttctgaacgacatgccgatgctttttgcggcttttttcataatgtgctttagcaggtcagttgtcatatcatagtctgcgatcacgccatctttcatcggtctgacagcgacaatttttcccggtgttttaccgatcatgtttttcgcgtcagctccgattgcaagcactgcttttgtcgtcgtatcgactgcgacaacagatggttcatttaggataatccctttatttttgctgtaaacaagtatattagctgttcctaagtcaatcccgatttcagttgattgaaacatgttttcacccaatctctatcctaatttaatatgattctacatttaaagtttctcagaaatactgcgatttttgggggtgtgtgtcggtaaagaaatgtttttgtaaaaaatcaaggaactgtgtaatagaagtaatacatttttcggttttatggaaaaaatatcttgtaattcttatagaaagcgggaaactttttcaaagtttcattcgtctacgatatattgaggtacatccttaaaacattacatgagaaaagaaacatttaaaggaagaagggtttttatgaaatcaataggtgttgtgagaaaagtagatgaattaggccgcattgtcatgccgattgagttgagacgggcattggatattgccataaaagacagcattgagttttttgttgacggagataaaattatcttgaaaaagtacaaacctcatggcgtttgtttaatgactggagaaatcacttcagaaaataaagaatacggcaacggtaaaattacgctaagccctgagggtgcacagctgcttctcgaagaaattcaagccgctttaaaagaataaaattatgctaaaaaaggcggagcgatatcatctccgccttttttgcgtatcaatttttgattaccgccgcctaagataagacatcaagatatttggtaatgaatgatttgggatactttacatattttactcaattatttgtcgaagaatggtacaataagtagagaaacacaagcggcaggtggtcatatgagaaaatatcaagctcgtatcatttccatcattttggcaatgatttttataatgttttgggattatttattttattttataggcaaaaacccgattaattggcctgttgatattgtgtatactgcagtcacgctggtaagtgtctggatgttggcttattatattgatgagaaacagcagctggttaagaaaatgaaggataacgaatggaagtataaacagctttctgaagaaaaaaaccgcatcatggataatttgcaggaaatcgtatttcaaacgaatgcaaaaggtgaaattacatatttaaaccaagcgtgggcatctataaccgggttttcaatcagtgaatgtatgggaacaatgtataacgattacttcataaaagaaaagcacgtagccgaccacattaacacccaaatccaaaacaaagcgtcttctggcatgtttacggcaaaatacgtgacaaaaaacggcacgattttttggggagaagttcattataaactttactatgaccgggatgaccaatttacaggcagcctgggtacaatgtcagatatcactgagcggaaagaggctgaagatgagctcattgagattaatgaacggctggcgagggaatcccagaaactatcaatcacaagtgaacttgccgcaggtattgctcatgaggtcagaaaccctttaacatctgtcagcggtttcctccagattatgaaaacacaatatccggacagaaaagactattttgacatcatcttttcagagattaaaagaatcgatttagtgctcagcgagctgctgctgcttgcaaaaccgcaggcaatcacatttaaaacacaccagcttaatgagatcttgaaacaagtcacgacattgcttgataccaatgcaattctgtccaatatcgtcatagagaaaaatttcaaagagacagatggctgtatgattaatggagacgaaaatcagctgaagcaggtctttatcaacatcattaaaaacggaattgaggcaatgccaaagggcggtgtcgtcaccatttcaactgctaaaacctcctctcatgcagtgataagcgtaaaggatgaaggaaacggcatgccgcaggaaaagctgaagcagattggcaaacctttttattcaacaaaagaaaagggcactggactgggacttcccatttgtttgagaatcctgaaggaacatgacggggaattgaaaatcgaaagtgaagctggaaaaggcagcgtctttcaagtggttttgcctttaaaatcagacagctgagaggagaaaaataaagtgaactcgcttctgtttgtatatgggacattaagaaagcatgaaaaaaaccatcatttgctggcacaatcggcatgtatcaatgagcaggcgagaacaaagggaagtttgtttgctgcaaaagaggggcccacagttgttttcaatgatgaagatgaaggctatatatatggcgaagtatatgaagcagatgaattgtgtatacataagctcgatcaattttttcaaggatatcataaacaaacggtgtttgtagaaacggatgtcgggattaaaattgcgcttatttattttatgaacaaagacgggtgtgccggttttacgaaaataagcagcggcgactggaaagaacatcagatgatcagcaaatcgaaaaatcccatttattattttgcctatggatcatgcatggataatgcccgctttcaaaaagcgggagtcgatcactattttcaagatccagtaggaagagctgttttaaaaggatacacaacccgcttcacgctaaaaagggaagacggttcaagagcggacatgttggaagacggaggaacaacagaaggcgttttataccgtatcccttattctgctctctcctatctatataaaagggagggcgtcgaatctcttacgtatcggccggcatttgtagacgttgaagctggcggaaggcactacaaagactgtttaacctttctcgtcctccaaaaagaagcggaaattgccccgcctcagcactatcagattgaaatcgaacgcggagcggagctgtatttgtcgcctgagtttactgaaaagctcaagcggcatatgaattcgctgccaaaaggataacactgtaacaaaagaatatgataaaatttgatcaatatcatgtcatataaaggagcactacgatgaaaaaagaatttgcggtaattgggctgggccgttttggtggcagtatttgcaaagcattaagcgaagaaggcgtcgaggttatggcaatggatatcgatgaagataaagtcaacgagtatgccaagattgcatctcacgcagttatcggtgattcgacagacgaatctgtcctgaaaaatttaggcctgcgaaattttgaccacgttattgtagcaatcggggaaaatattcaagcgagtattttaacgacactcattctgaaagaacttggcgtccatacgattacagttaaagcgcagaacgattatcacgaaaaagtgctgtctaaaattggtgcggatcacatcgtccacccggaacgcgatatggcaaaacgaattgcgcataatatcgtgtccaacaatgtacttgactatttggagctgtctgaagagcatagtcttgttgaaatcgtagctaacagccgcctggctggaaatacacttctcgatttagatattcgcgcaaaatacggtattaatatcgtagccataaaaaggggcaaggaagttatcgtatcaccgcttgcaaccgaagtcatccaccaagaagatatactcattgttattggatcagttacagacatctcccgtttcgaaaaaagagttcttcatacaaaatagcagccaaataagccgtcctcaaagggcggtttttcatattatcagaatataacaactttaatgaactgagcgtcaatttcttaaaatttcattgactaagcacaggcgttccgatagcatattgtaccatataataaaaaagaggaggggcctatttgaataaagaagcgctagtcaataggctgaatgcttcagccaaaagacaaaaagctgatatcgtcattaggaacggaaaaatcatggacgtttataatcaagaatggatatatgaagatattgcgattacagatggagttattgtaggcctcggtgagtatgaaggtgaaaataccattgatgcagagggacaaatgattgttccgggttttattgatggacatgtacatattgagtcgtcaatggttacaccgattgagttcgctaaagcagtgttgcctcatggtgtgacgacggttgttacagatccgcatgagatcgcgaatgtgtctggtgaaaaagggattgtgtttatgcttgaacaagctcggcatacaccgctgaatatccattttatgcttccttccagtgtgcctgccgcaagttttgagcgatcaggcgcaattctcaaagctgccgatctcaagcctttttatgaagaagaagaagtattagggctggctgaagttatggattatgtgtcggttcagcaggctgaagaagacatggttcagaaactgctcgatgcccgtgtggcaggaaaacggatagacggtcatttagctggtttatcaacagacctcattaacatttacagaaccgcctttgtcttaaacgaccatgaagtaacatcgaaggaagaagcccttgatcgtatcagaagaggcatgtatgtcatgatgcgtgaaggatcagtcgccaaaaacacgctcaatgtgctgccggcggtgaatgaaaagaacgcacgccggttctttttctgtacggatgataagcatgtggatgatttattgtcagagggaagtgtaaaccatcaggtgaaaatggcgattcaagctggacttgatccgtttttagcctatcaattaggaagcctcaatgcggccgaatgctacggattagatacaaagggagcgattgccccgggttttgacgctgatttgctctttgtatctgatctggaaaatgtcactgtcacaatgacgatggtaaaagggcagactgttgctgaagacagcaaagcggtttatcaggatcatgcttcaactgcagcaccagatcaggcactgcttgattctgttaagcttgctgctcctcttaacaaacaggattttcatatgccaatcgattcagaggagcagatcaatgtcattcaaatcataccaaatcagcttgaaacacgattagtacaagttccggctcctgatgcccgcgaatttgagcctgacactgagtttgatttgttaaagattgcagttgtcgagcggcataaaggattaaaagaaaccggacttggtattgtgaaaggttttggattcaagagcggagcgattgccacaaccatttcacacgactcccataatattattgctgtcggaacgaatgatgaggatatcgcggcggcagttaataagctgcaggaaattggcggaggattaacgattataaaaaatggggaagagctccattcagtaccgctgccgattgcagggttattatccgaccaatctgcagagcaagtgaatcaaagcttgctgacgcttcatgataaattgccgttaatcggtttcacaggcggatttaatccatttttgacattgtcgtttttagcgttgcctgtcattcctgatattaaaatgacgactacgggattattcgatgtaaaatcatttcaacacatatcactgcaataaaaagaggcactccctaagggagtgcctctttttttaaacctccataatgatcggcaggatcattggacggcgctttgttttttcgtacaagaaaggtgcaagcgtgtctgtaatctcatttttgatttcagaccattgagtcgtttttcgttccattactttttgtaagtgatttgaaatgagctcttgagcgtcgttgatcaagtcgccagattctctcatgtacacaaatcctctggaaatcaaatctggacccgctgaaatcttgaagtcgtccatgtcaatgctgacaacaacgatgacaagtccttcttcagagagaattctgcgatcacgaagtacgatattgccaatatcaccgataccgcttccgtcaatgtacactgaaccggacgggatttttcctgcaactgaagcctcatcgcctttaagcgctaatacttcaccattatccatgataaagcagttttcctctgggatgccacaatctgttgcaagcttgacatgcatcttttgcattctgtactcaccgtgaatcggcatgaagaatttaggcttgattaaacgaagcatcagcttctgttcttcctgtccgccgtgaccggatgtatggatatcgttaagagggccgtgaataacctcagcacccgcacgatacagctggttgattgttcgactcacgctgattgtgttgcctgggataggggatgaagaaaatacgaccgtatccccaggattgattgaaatttggcggtgtgtgccgtttgcaattcttgataacgccgccattggttccccttggcttcctgtacataaaattgttactttattagcaggcatacgattgatttcgttatgctcaataaacgtatttttaggacagttaatataaccgagtgtctgtccaatttcgatagccgattccatactgcgtccaaatacggcaacttttcttccattttgtacagcagcttcaattacctgctgcaagcggtgaatattcgacgcaaatgtagcgaagataattcggccgtccaccttgcggaaaatgtcatgaatgctttctcctacacgacgctcagacatggtaaactccggattttcactgtttgtgctgtctgaaagaaggcacaaaacgccttctttaccgatttcggccattttcgttaagtttgccggctcgccgactggagtaaagtcgaatttgaaatccccagtatgtacaatgtttccgggcggcgtttttacaacaatgccgtaggaatccggaatactgtgtgttgttctgaagaatgacacagccgttttgcggaactttacaatatcatcctcgccgataatgttcagtttcgtctgtctcaataatccatgctcttcaagtttattccgaagtaagccgatcgcgagttttccgccgtatacaggaatattcacttgtctgagcaggtatggaataccgccgatgtggtcttcgtgcccgtgggtgataaaaagccctttaattttatcttcgtttttgactaaatacgtataatcagggatgacgtagtcaattccgagcagttcgtcctcgggaaacttgatccccgcatcaatcagtacaatttcatcctggaattgcaccgcgtacgtatttttaccgatttcgcccaaacctccgagggcgaaaacagcagtctgatcattttttacaaatttcataccgctcataactccaatactttaaaattttcgctctgttgttcatattctaagaatgcaccatcaacaggtgtaataaactcaatattaaatttcttttctttcagctttgttctgacgtcacgctcagatacgccttcaatataaagtgaatctgtcttttcccgaacaggtacttcgtcagccttctcttgataaaataccttataaatcattccaaatctctccttaaatgccgtatgttagactcgctcattctattatattcgaaaacggaatataaggaaagccttgagcaaaataaggatctctcaaatagtgaaagatcccttgtcaggcaattgctttcttacggagcattccgttccattgtcttctgagtttctttcttaatttacgcagcattagccagtccctcctttaatgaaaaatttgtcccagagttcttttatacaaatagtatacggagattgaggaagacttttcgtggttattaatggaatttaatatgatttttgaacgaaattgtttgctgaatgacaatctttttgtatgatgagggtgggaattgcagaccaagacgataaaggggaagttgcgatggattctaaattaatcttttttgatattgacggcacaatatatgatcatgataagaatataccggaaagtacgagaaaaaccgtggcggagcttcagcgccaagggcatcatgtgtttattgccagcggccggtctccatttttggttaagccgattttggaggagctgggcatccactcatttatttcctacaatggacagtttgttgtctttgaaaatcaagtgatttataaaaatccgctgcctgaaaatgcaatcaggcgattattaaagcaggcggatgaaggcaagcatcctgttgtgtttatggctgaggacacgatgaaagcgactgttgcggatcacccccatgttctcgagggaatcggcagccttaaaacagattatccagagaccgatgaccttttttatgaaggaaaagaaatttttcagcttcttttattttgtcaggatgaagaagaaaaagcttatgccgcttttcctgagtttgatctagttcgctggcatgagctatcgactgatgttctgccgcacggaggttcgaaggcagaaggaatcaaaaaagtgattgagcgtcttccgtttgatatcggcgatacatatgctttcggcgacggattaaatgatttgcaaatgattgaatacgttgggacaggcgttgctatgggaaatgctgttcccgaactgaaagaaatcgcggactttgtaacaaaaccggtggacgaggatggaattgcatacgctgtcaaagaattgggccttttaaaataaagaaacggctggcattgtgccagccgttttctcttttagcgctcaattgcgattgcattttcaggttctttgaaaggattttccttatcaatatgatcatagaacataacgccgttcaaatgatcgatctcatgctgaaacacaatagccggaaatccttttaaacgaatatcaatattttcgccttctagtgttgttccttttactctgatgcgagcatagcggggaacataaccgggaatcgcttcatccacagagaggcagccctcgccgcttgttaagtagcttttttcaactgaatggctgacgatcttaggattaaacagagcatagctgtataatttaccggaagcatcttccgcatgaacggcgatcattcgttttttgatattaatttgaggagctgcgagtcctacgccagggcgcagcttgtatttttcggctaattctggattttggctgtttttaacaaattcgatcatgtcggccagctgctgtttttctgcatcagttggaggcagctcaacaggttcggcagtctctctgagggctggatggccgtcacgtacgatgttttccatagtaatcaagaaacttcactcctaaagcttaatatgtaaattatatcggatttcttcacaaaggtgcaacgaaacgaatgaccagccgtatatggctggtcaatttcatgctgtgtggttagcaacagcctccacctaaataagcagctccgacaatgattaacagaatgaataaaacaacgattagcgcaaaggtgcggccgtagccatatccgcagccaccatatccgtaaccaccataactgcagcagcctccgccgtaaccatatccatacatattacataacctcctcttttaattacgccagagcctttataagtaggcatagcgtctaatataacctatgtaaaaacaaaaaagttgtatggtcatctgtcctgatttttcacttttttgatttaatttcagtattgcatttatacagcacggctattgccaaatgtccccatggattctatagtagaaattgtcaagattgggggatttaacgtgaaagacgctataaaacggcggcctggaatgaagatcggagctttttgtgccatggcactgatattaacaggatgcatgggacaggacccggttgattcagttcatcattcattagaaaaagccgcggaatcggaaaagccgtttcaagaagaacaaaacacactcaaagaattagaggccaaagaaaatcagctttacgatagtgttatgaagctcaatatggatgattataaaaaaattgttgctttatctaataaggcgcttgaaaatgtcagcaaacgcgaagaacacctagagcttgaaaatgacagcatgaaaaaatcggaaacagaatttgaggaagcaaaaacgtcagcggaacatattaaggaaaaagacataaaagaaaaggccgatgccgcagcaaaccatatggagaaaagatatacatcatatggcactatgtataaagagtataaaaaagcgcttgagcttaataaaaaactgtatatgcagctgaaagacaaagatttgacaagagatgatctggatcagcagatcgataaagtcaatgcttcttatgaaaagatccttaaatatagcggagaatttaatgaacaaaccgaaaaatataataaagcccgggaagatttatatgatgctgcaggctatcgtgtgaaaaagagctgactcgatcagctctttttttgaatgaaatgcgattcggatttcgttcaaaattttcatttctattgtagtacagcatagtaaggtatactagtacagttttgggtgcggttggcatctgtttttttgatgaaaatgtaaagcgaatacatttattgaaaatcagcgatgaaaacgattgacggttcttctttatttggtgtaaactaatccatgttaagcggtgttgtattagttttttacaacttcgaaataatacagttcaaagcagagtgtaactatcctacataaaaggttttggcaaactggggatcggctaaaatataatacgacttactgctgatactttagggtaccctaagtttgtatgtataaaaggaatgcacgtctaatgactgtttaaaagaaaggaagaggtgacttagtatggctgcaaaaacgaaaaaagctatcgttgacagtaagaagcaatttgatgccattaaaaagcagttcgaaacgttccaaattttaaatgaaaagggagaagtcgtgaatgaagcggcgatgcctgatttaactgatgatcaattaaaagagctaatgcgccgcatggtatttacgcgtgtgcttgaccaacgctctatctcattaaaccgtcaaggacgtctcggattttacgctcctactgcgggtcaagaagcttctcagattgcaacgcatttcgcgcttgaaaaagaagactttgttcttcctggataccgtgatgtgcctcagttaatttggcacggccttccattatatcaagcgtttcttttctctcgcggacatttcagaggaaaccaaatgcctgatgatgtgaatgccctttctccacaaatcattatcggtgctcaatacattcaaacggccggtgttgcgctaggtcttaaaaaacgcggtaagaaagctgtcgcaatcacttacactggtgacggcggagcttctcaaggggacttctacgaaggaattaactttgccggagcttataaagcacctgcaatcttcgtggtacaaaacaaccgttacgcgatttcaactcctgttgaaaaacaatctgcagctgaaacaattgcacaaaaagctgtagctgccggtattgtcggcgtacaagtagacggaatggatccgcttgctgtatacgcagcaactgctgaagcacgcgagcgcgcaatcaacggcgaaggtccaacactaattgaaacacttacattccgttatggcccgcacacaatggctggtgacgatcctactaaatatcgtacaaaagaaatcgaaaatgagtgggaacaaaaagatccgcttgtacgcttccgtgcgttccttgaaaacaaaggcttatggtctgaagaagaagaagcaaaagtaattgaggatgcgaaagaagaaattaagcaagcgatcaaaaaagctgatgctgaaccgaagcaaaaagtaactgatttaatgaaaatcatgtacgaaaaaatgcctcacaaccttgaggagcaatttgaaatttatacacagaaggagtcgaagtaagccatggcgcaaatgacaatgattcaagcaatcacggatgcgttacgcacagaactgaaaaatgacgaaaatgtcttagttttcggagaagacgttggtgtaaacggcggcgtattccgtgcgacagaaggattgcaaaaagaattcggtgaagaccgtgtgtttgacacgccacttgctgaatctggtatcggcggtcttgcccttggtttaggcttaaacggcttccgtccggtaatggaaatccaattcttcggatttgtttatgaagtaatggattcagtttctggccaaatggctcgtatgcgctaccgttctggcggacgctggacttcacctgtaacaattcgttctccattcggcggcggtgttcatactcctgaacttcacgctgacagcttggaaggtcttgttgcacaacagcctggtatcaaagttgtgattccatcaactccttacgatgccaaaggacttttaatttctgcgatcagagacaatgatcctgttgtcttcttagagcatatgaagctttaccgttctttccgtcaggaagttcctgaagaagaatacacaattgagcttggaaaagctgacgtgaaacgtgaaggtactgatctttcaatcattacttacggcgcaatggttcatgaatcgttaaaagctgctgaggagcttgaaaaagacggcatttctgctgaagttgtcgaccttcgtacagtaagcccacttgatatcgatacaattatcgcttctgtagaaaaaacaggacgcgcgattgtcgttcaagaggcacaaaaacaagccggtattgctgcaaacgtagtagcagaaattaatgaccgtgcgatcctgagcttggaagcacctgtacttcgcgttgcagcgccagatacagtatttcctttctctcaagcggagagcgtatggcttccaaaccataaagacgttcttgaaacagcaagaaaagtgcttgaattttaatcaaactgcataatcgagagggaagatgaacgttttccctctattatatatctgttttcaatgcttacgatgtaaactttaaaattgcttaatcaaactaggaggtcgagaactgtggcatttgaatttaaacttccagatatcggggaaggtatccacgaaggcgaaatcgtaaaatggtttgtcaagcctaacgacgaggtagacgaagatgatgtactggctgaagtccaaaatgataaagcagtagtagaaattccttcacctgttaaaggaaaagtattagaattaaaagttgaagagggaacggttgcaactgttggacaaacgattattacgtttgatgcacctggttacgaagatcttcaatttaaaggcagcgacgagtctgacgatgcgaaaactgaagcacaagttcagtcaactgcagaagctggacaagacgttgcgaaagaagagcaagctcaagagcctgcaaaagctactggcgcaggacagcaggatcaagctgaagttgacccgaacaaacgcgtgatcgctatgccttccgtacgtaaatatgctcgtgaaaaaggcgtagacatccgtaaggttactggttcaggcaacaacggacgtgttgtaaaagaagatatcgacagctttgtaaacggaggagcgcaagaagctgcaccgcaagaaacagctgcaccacaagaaacagctgctaaaccggctgctgcaccagctccagagggcgaattcccagaaacacgcgaaaaaatgagcggtatccgtaaagcaattgcaaaagcgatggttaactctaaacacactgctcctcacgtaacgttaatggacgaagtggacgtaacaaaccttgttgcacatcgtaaacagttcaaacaggttgctgctgatcaaggaatcaagctgacttacttgccttacgttgtaaaagctcttacatctgcactgaaaaaattccctgttttaaacacgtccattgacgataaaacagatgaagtcatccaaaaacattacttcaacatcggtatcgctgctgacactgaaaaaggcttgcttgtaccggttgtgaaaaatgcagatcgtaaatctgtctttgaaatttctgatgagatcaatggccttgcaacaaaagctcgtgaaggcaagcttgctccagctgaaatgaaaggcgcatcttgcacaattacaaacatcggttctgccggcggacaatggttcactccggttatcaaccatccagaagttgcgattcttggtatcggacgcattgcagaaaaagcgattgttcgtgatggcgaaatcgtagcagctccagtcttagctctctctctcagcttcgaccaccgtatgatcgacggagcaactgcgcaaaatgcattaaatcacatcaagcgtttactgaacgatccacaattaattttaatggaggcgtaatgttatggtagtaggagatttccctattgaaacagatactcttgtaattggtgcgggacctggcggctatgtagctgccatccgcgctgcacagcttggacaaaaagtaacagtcgttgaaaaagcaactcttggaggcgtttgtctgaacgttggatgtatcccttcaaaagcgctgatcaatgcaggtcaccgttatgagaatgcaaaacattctgatgacatgggaatcactgctgagaatgtaacagttgatttcacaaaagttcaagaatggaaagcttctgttgtcaacaagcttactggcggtgtagcaggtcttcttaaaggcaacaaagtagatgttgtaaaaggtgaagcttactttgtagacagcaattcagttcgtgttatggatgagaactctgctcaaacatacacgttcaaaaacgcaatcattgctactggatctcgtcctatcgaattgccaaacttcaaatatagtgagcgtgtcctgaattcaactggcgctttggctcttaaagaaattcctaaaaagctcgttgttatcggcggcggatacatcggaactgaacttggaactgcgtatgctaacttcggtactgaacttgttattcttgaaggcggagatgaaattcttcctggcttcgaaaaacaaatgagttctctcgttacacgcagactgaagaaaaaaggcaacgttgaaatccatacaaacgcgatggctaaaggcgttgaagaaagaccagacggcgtaacagttactttcgaagtaaaaggcgaagaaaaaacggttgatgctgattacgtattgattacagtaggacgccgtccaaacactgatgagcttggtcttgagcaagtcggtatcgaaatgacggaccgcggtatcgtgaaaactgacaaacagtgccgcacaaacgtacctaacatttatgcaatcggtgatatcattgaaggaccgccgcttgctcataaagcatcttacgaaggtaaaatcgcagcagaagctatcgcaggagagcctgcagaaatcgattaccttggtattcctgcggttgttttctctgagcctgaacttgcatcagttggttacactgaagcacaggcgaaagaagaaggtcttgacattgttgctgctaaattcccatttgccgcaaacggccgcgcgctttctcttaacgaaacagacggcttcatgaagctgatcactcgtaaagaggacggtcttgtgatcggtgcacaaatcgccggagcaagtgcttctgatatgatttctgaattaagcttagcgattgaaggcggcatgactgctgaagatatcgcgatgacaattcacgctcacccaacattgggtgaaatcacaatggaagctgctgaagtggcaatcggaagtccgattcacatcgtaaaataattttcatatcaaaaacagccctcgctcaaagcggggctgtttttttattttgacagcacatgctgtaatggtttaatgatgtcttctttctttttcacacatccctcgattttcaccacgacatggcgctgatcaacaaccataagggtagggacagtttcaatctcatcttcccagccttcttttttatcatagaccttcattttatctatttgctcgggataatctttttctaaatcaagcagtgcatcgtaataaggcgcttcctggtctatttggttctcatcagaaaaaaacaggatttgtgtatgatgaatgttgtcaatccggctttttttcatcggattgatggtggaaagcgtacagcccgataaagcaaatactattatcagcatggggaataccgcgcgatatcgcatctatcttctcctctgtataaacagtagttaactagctttagtttatcacgagaggcggcttaatctgcttcttgttacctaattgttatataattgaaaccgtttttaaagtgagattacatattatatcaatcgtttaaaatagcaacctggggtatattgaattttttgctgcattcttggatgaaagttcaagaaaacgtgaaattacattatgtgctgtggcatatatatcgagtaaagcttctgtatgaagaagatattgtatgagggaaaatggaaaagcacggtctatatgatgatctaaaattaaatgtgttatacagtttattgttgacattttaaatgtgacatattaatataataacaacaaaagaaattaagcgttttcaaatttcaaagaaatggggaataagagatgggtacgattgtttgccaagattgcaacgaagccattcattactttgaagatgagaaagtgacaacattatacggaacatgctgcggacaatgtcaatgtcctgttgatgaagagtaaaaaaaagcatgcggctttaagccgcatgctttttattttttattgaattgctttttgttctttgatgacccggatcatatgtaaagtcgagtcctcaggtccttgaacagggaggcctgcgtcaaggtttttaaaaatgtagctgatgttttcttctgtaataatttctcctggaatgaagattggaataccaggcggatataccatgacaaattcagcaataatccgtccggatgcttcttttaatgggatgacttccgtatttgcataaaaagcatcacgcggagtcattgccaataaaggtatttctggaagcagaacctcagtttgctgatgtgttacatcttgttctgacatttgctgtgcgatctcagttaaagcctctacaagccggtctgcatcattttggctgtcaccaggagtgaaaatacacaaaatattgtacagatcagaaagctcaacctcaatattaaaggattcacgaagccatttttccacgtcatgtcctgtcaggccaagacttttcacagagataatcaattttgtcggatcatagctgtaagctgctttcgaaccaagaatctcagaaccgacacaataaatgccttcaatctggttgaggcgatctctcgtctgattggcaagcttgagtgtttcctcagcaagctggtggccttctgttgcaaggcgttttctggcaacatccaaagaagcgagaagcaagtaagaagttgacgtagttgtcagcatgctcaggatggattgcactctgtcttttgatacaaggccctctctcatgtttaaaatcgaactttgcgtcagtgatccgcccagcttgtgtacacttgtcgctgctatgtccgctcctgcctgcatagccgatagcggcaattcgtcgtgaaaatgaatgtgaacgccgtgtgcttcatccacaagcactggcacatcaaacgaatgagcgagttctacgatgctttttaagtcggctgcaacaccgaaatatgtcgggttgatgacgagaagcccttttgcatccgggtgctcggtaagcgcccgtttagcagattcaagtgtaattccgtgggagatgcccaattcattgtcaatttcaggatgaataaaaattggaaccgctccggaaaatacaatagctgtcataattgatttatgaacatttcttggaataataattttatcaccaggtccgcaaacagccattaccattgtcataatggcgccgcttgttccttgaacagaaaaaaatgtatgatccgctccaaatgcttcagcagccaggtcttgtgcttgtttaataatgccttttggcgcgtgcagatcgtctaatggttcaatattaatcaaatctatgcttaacgcgttttcaccgataaattgtctgaattctgggtccattcctgccccttttttatggccgggaatatggaattgaacaggctgtctgcttgcatgctttttcagtcctgtgtataagggtgtttcatgttgcgacaattgttttcccacctttgtaatcatacctatgcataatagtgtgtattaaaatcagtttctcaaccgttttttagacgtaaaacaaatgaattatattatgaacttgaaagaatgtaaagaacaatttatgatcaaatgaagatgctttctcttaagggaagtaaatctacaaggagtgaagaaaatggagtatcaatatccgatgaatgaagattggacaaccgaagaagcagtggatgtgattgcatttttccagcaggttgagcttgcatatgaaaaaggggcggatcgtgaagaactgcttaaagcttaccgccgtttcaaggaaattgtaccggggaaggccgaggaaaaaaagctatgcggcgagtttgaggaacaaagtacatattctccttatcgcacggtcaaacaggcgagagaatctgatcaggcgaagattaagatgtaggaaaaagagctgggggatatcccggctcttttttatgcttgtgatactttttgggtgagacggtacagaaaagcaagctgcttaaaggcatcgtcgatacgctgaaggaattcctggttattcatattcagcacttcttctttttggagctggatgccgcataacagctcggctttctttacagtctgcaaacgctcaaacagtgtcttcagctgttccttgtccatttcagactgtttatgtactcccggttttgtgtgatctgcagaccaaacgaagctgtcagggatatttttcgtaatggtttcttggttcatttcaagcaatttgccgtattcttctttgataggggattcataaataatcgcaaaccacacaaagacgtggctttcccataaaccaatttggaaatgcggcagttttttatagcctcttttgctgtttgcgaacgccacccagctgtcagccgggggattgacggatcttcttgcgtgctttgccacatgcgcaaacatttcatctccggttaaagctgataaagttggggcaaaatgttcgcctagagctgtaagcttcggacggaccgtctcttttaatacttccatgcgcgcgtctaagccttctattgtaaaagtgttaaagtcctcttcagtgaaacgcatttgtgtcatgattttcctccttcatgctaagtatacatattttatcacagttcatacgagcttcaaaaagattgagtgcgtttgaagtaaggggaaatgtggtaataaacgaataggtaaacacacaattttcagaatcatgttgcgcgtaaatagaacaatcatacgatataagaagtaatcattgttgaatggcaaaatgggatgcttttttacaaacaaatgatctctggaaggggcgaaagacaatgaggcaagttgtaaaagagggatttaaggaagagaaaaacaatcgtgttgctgtctggagactagaggttgattatgaattggcaaccctatatgaagcaatgcagaaagaaaatgaagagcagattgaacaaagcaaaaacaaacttgagcgacttagaaaagaatggattcgtcttaacgggtaaaaaagcgatagtgaaaacgaaccgcatgaatggttcgtttttacgtgagaagggatatttttcattttccttgctttttcattgccgttatcagtatcctataaaataaaaggtctacatagaagagaggtacgaacgaatgacaaattggacggaaattgatgagattgcaaagaagtggataagagaagcaggcgcgagaattacacaatccatgcatgaaagcctaacaattgaaacgaaatcaaatccgaatgatttagtcaccaatattgacaaagaaaccgaaaagtttttcattaatcgaattcaagaaacttttccgggacatcggatactcggtgaagaggggcaaggagacaaaatccactcacttgagggagtcgtatggattattgatccgattgatgggacgatgaattttgtgcaccagcaaagaaattttgcgatttccattgggatttttgaaaacggtgaagggaaaatcggtttaatttatgatgtggtgcacgatgagttgtatcacgcatttagcggcagaggagcttatatgaatgaaacgaagctggctccattaaaagaaaccgtcattgaagaagcgatacttgccattaatgcaacatgggtaacggaaaacagaagaattgatcaaagtgtgttagcgccactcgtgaaaagagtcagaggcacacgctcctacggttctgccgctttagagctggcaaatgtcgcggcaggaagaatagatgcttacatcacgatgcggcttgcgccatgggactacgcagccggctgtgtgctgctaaatgaagtaggaggcacctatacgaccattgaaggagagccgtttacctttttagaaaaccacagtgtgctagccggaaacccatctatacataaaacgatatttgaagagtatcttcatgctcggaagtaggccatttgagcaggatgatctcagcttgttagaaaagctcgcagaggctcaacctgtatggaaagaggaggagtttggagataaagatgcagaagactatatcatttcctactccatgtacaacggttcatggcttgtatgggaaaaagacggtatgcctgttgccgtcagctaccatctcgagtggtctccttcaaacggtaagccgtggctcggaacggtcctgattgacccggctgaagaaaaaaagggacatgcgaagatgatcattgaacagatcagcaaattgcttagagccaaacacaaagcgatgtttgcgggagttcccattgagcgcagtgaatggatactgtttttaagccaatgcggctttgaacagctgaaaacggaaaaagatgagaaaggcaaatcatttatgatcttggtgaagcctttagcagaagctgccgtatgataacgacagcttatttgctgcatgcgggttcaataaaaagcctctcaaacattgagaggcttctgatgatttgaaaattatttttttactgcatgaatataatgaatcgtttcaaacgctgacaaattgtcttttcgattactaaagaaaaggtcattgatgtcgtctggtgatagatgttcatagatcagtaaaccagatgactctaacagatgttcaatctcttgataagtgaaacatgatttcatcggttccccgcttgcggcagccatcttcaccatatgttcaactcgatttgacgtcccttttgctgtaaaaagtgtttcgtccgcataatcaaaaacaatagagcttccaggcgggacataagaaaataaattgctgatcaagcttgcattttcttcccgtgttacataataagacactccgagaaggctgaagaatgtttttgtgttcttaaatccttcatctaagagaggatcatacgaaaacgttttggtgaaatccataggaacaaaatgaagatgacccggaattgtcagatttgcatccttcagcttattttttttgaattgctgtgtagccggatggtcaacctcgaaaacctgtaagctgttttctaattctggatgccgaaagcagaaggtatccagccccgctccaagaatgacatactgttttgcccccaggattaattcgttgtgcaagactttttcacaataagaagcacgtgctagtggcgtgggagacagctggatttgtgcaacccattttaatattttttcaggatcattttgaagacgttcggcgatctctttgttgaaaaacgatattccttgaatcatatttttactgatgtcgataaactctttttcgttaatgagatcttttgcgataaaatcatcaaaaataagagatgtgtcatatttgctgtgataagcacgggcaaacgctgaaatcaaagacgttaagctggactcatttttcctcatgaaatgatcctccacaaaaaataagattctcctggccaggagaatcttattatacatacaaatatattaatagtaaattttagcataaataaatttttttgtcaatgtttttgctcttaactggacgcgcgatccttcacatagccacgtgacctgtagcagaattcgtctatcaattatgtggactgaatcattagcttttataaaatgcgtacttgcggctgcatccctctttttgcaaatcaggagcggttttctgtctcatggcagcatcttttcgtcgtttcagctgagagagaaatcaagatatgtaacaataaaagcctgagggatctcaggcttttcctaatattacaatccaacagcattccaggctgcttcaactttagcggcatcagttgagccgtagaggtcacgggcagactgaatgagagctgccttggcatctttgaacgtggaagaaggcgtgaggtacgttgttaacgcacggtaatagatttgctgtgatttagatacaccaagttttgtgatggtgttgtaagcggctttgtttggaattccgctgtttgtgtgtacaccgccataatcgccttcatctgtgtttggaaggtttcggtaattggcgtaattgtcaggctggttgtattttgtagggttggacaggctgcgaagagcaggctggctgaccgtaatgtcttcaccgatgtcccagtcttctgtatcgttaaaatacccgaatacgtcagagaaagactcgtttaatgcacctggctgattttcataaatcaagttggctgtttcttgggtgacgccatgtgtcatttcatgcgctgtcacatctaatgagccggaaagcggagagaagaatgaaccgtcgccatcaccgtaaatcatctggtctcctgtccatgcagcgttattgtattgagtgccatagtgaacggaagaaacgattttactgcctttgttatcatagctgtttcgtttaaagtttgaataaaaataatcgtacactttaccgaggttatagtgtgcgtcaacggctgcccgctgtgatgaagatgtaaatgttttcgttgtgcttgagacaagcgttcccggaaggcggctttgtctgttttgcaaatcatatgtgatgatttgggtgcctgttggttttgaaagatctcttagaacatattttccgccttcataagagatgttcaaaggaacagttgcgccctttagagttgttccgcttccagtggcggcggcatgttctactttattttgctgttttaaaatgctgcctgtttcggcgtcaactaagacttcccagtttgcaggttcaggctcgacatagcgaatcgtcacgtcgtaagcaagacgatagctgccgtcttttgtttctatggctttcaattcggctttattgctgtttttggccgctccgttagaaacagcgtctggtgatttgccgatagctttgaaagcgagtgccagcgctttttcagaagagactttttggctgttatctgtttttgcagcagattgattgtgtaattcaccattgaccgcatagacattatcggatttatcgacgtgaacgatcacttgcgaatctttaattggcactccgttaacgacaggcgcatatcgaaagtgcttgtatccaagggcatcagtcgtgctttcaacaagcttcagccttttggaaggatcacctttaaaaatgttgctgttctttttcaaaaactgcttgacagccttgtcatttggtgcagagagttctgattgcgcaatcgcatttttggagaggaaatttgtttgattctctttaagctgatgaccttcagcagcctgaacacctggcaggctgattgataaactcataaacgaagcagcgacagcaacagacaatttcttacctaaacccacaataaatccccctttttgaaaatactgaaaactttatattgttatattaaactagcattctggaatactcaacaaaaactaacataactagacaaaattgatagtattgtcctgtgtttgtttttgttgaataatatcaagatgagtcaagtgtcatgtggtggttcattcaagagttatgttttttacatatcaaggggaagatgagatatttttgtttcatcttgaaactttttgaaaagtccgctgtctaaccgaatgaggccttaataagaagtaaaggattgttgttcgtgttggagttattcagtcattatgtattgcatttcgaacgttattttatattaagcagacaaagcaccctgctgattcaatggtcaattgttgttctggcgggtttatatcttttggggcatcatcccaaaataaaccggcagcgcacaatgttcatggcgggtgttatattgcggattgtgctgctggcgggagtgtctgttgaacttattcaccaagtgcaatcaacaaacttcaccagcgcttacttaagagaggacggaaatgaactgctgccgctgctgcattttttgttatacggatatgtgctgctaacggcttttcactatatgctgatgccgcgtgatcatggcggaaagggtaagttttatacgttcgaccttgccgttgtcagtttgccaatcgtacaaatgatttttagtttcttttcgtattggaaggaatacccggatgggatggagccgattgcattcgtgtttctgtttttcatcatcactcttcccattgcgttgaatgtagtgtttttcaagctgcattggagaacggataagatcttactaggcttattttatacgctgattatcggactgcttgtcttgctgcttgtgccatatcccaatcaaatctcaaaagattatggtgcagtaatgccatatacgatttatttggcaatggcgggatttttgatgagctatcatctgttccaaaagtcaggaaaggtttatgtgcgtgtgaataagtgggtgacgatggctgtcctggtgttttttgtcctgctgttaaatccgatatataacataggaacggctgctttcgctgtatcaaagccagcaaatgtccatgattcattcaattttgtcggggagcacatttcatcagaaaaagcggaacagatactaaagtcattttttcctacggatgaaacactttatttgcacgatacaaacatggatgtgcattatttctactcatttgaaagcaaaggttacaaagctgaggtagatgaagtatcgcagctgattcgtaattatgaatacttacaaaaagcacatgggaaaaagctaacgaatcaggagtacaagcgaaagtccatcgctttccttgagcgacacggacgtgtgttacataaggatcatatcgaaacaaaggtatctcaagaagacggccagacagtcgtacgtatttacctgaaaaaccagcttcataaaaaagatcatgctgatgatggcgcggtattttattgggaaaaggaaaccttaatggggtttagtgaagatccttcgatttatcagcttgactctcttctgcatgttcatataacggaacaagacattcacgacaaagtggaacaaatgtttacagcgctgaacatatcaaaacagccttatcagatcactgatattgaaagcgacagcctgcttggaagcatggtgagagttgaaacaaaaggtggaattgttttggaatttgagggcgaatcaggttgtttacatagtctttcgcttccgatgaaaaagaatatctcaatggctaacagccggctgcagcatcagatattatcgatcttcgatgctcgtggatcagaaaagaagaaaaaaagcagtcagggtgacatggtgatgtatactgattcttctaaaacatatgagtttgttgaagctcaaggtcagctaaacgtttatgtatacagcgatacacctgatcagtcattcccctatacgtatcgtaatggaacattggcttacgaaaaagtagcttctctatatcaggatgtcatttacaaaaagcgtatgcgtccgattatcgttcaaagaggggatgaacggcattatgcatggctgatcattattcagccgtttggttcaaatcgccatgatgcctatgtagtggatggagaaacacaagaggtgaaaagtctttatgaatcataaagaaaaagagtctgtttttgtagacttatacgacctgtataaagaaggagagctagaggatgaatcaatggaatggatgaaacagcatgaatccctatttcaaaagaatgcggaagacttaaagagtaaaacttgtttaaagagaagtcccggtgctgaagaagaaagccaaatcagatatatgaaagtatacctgtcttccatgtatatctgtttcattttattggccatttggatgacggtgtggttttacttttaatgaagcatagggattccattgaggacttgtatcggcagtattatcaagaaattttaaattatttattcagaaggactcatcatcttgaaacagccaaggacttagcgcaggacacgtttgtgaaagctcttaatggtctggcttcgtttagggggcattcttccatcagaacatggctctacaccattgcgcatcatacctttatcaattggtaccgaagggatgtcaaataccaatttactgaaatcagcaaaaatgaagggttaacgcaaacaacttatgagcagcctgaacagtatctgtcacgaacggtgaaaagcgaaacactgcggcaggagctcctgaagttaaaagatcagcatcaatccgttttgattttaagagaattccaagagctttcttatgaagaaatcgctgagatattgggatggagtctttctaaggtgaaaaccacattgcaccgggctagattagaacttaagaaacacatgacgaaaagtagagaggaggagcggatatgacctgctttctagtaagagacctgcttcctctgtatcttgaaggtgattgtaaaagagaaacggaacacgttatagaagagcatttaaaaatgtgcagcagctgcagagacatgtatgacacgatggctgagccatttgaattggaaagcgaacaggccgttgaggaggcttatctgccggaagaagaactgcgttttaaacagaggtactatggattactgatcatgaaagctgcctgctggtttggagcggtggttgccatgatgctgatcatcaaactgctgatataaaaaaagcgcttgtccgattccggcaagcgcttttttacattaagcctggggatgaatcatatcgtaaatagcggcaagctgttcttgtgacagggcactgaagagtttttcataaacgtcagcttgcagtggcgttgcacctgcttgtagcgctgcgtctttatcatagctgtacacatcatcttgtagcacaatggctgcttgaagaatgtgaatcttgagagaaacagcggagaaaaattgttcaagtgcaagtgcttctttttctgtgaagccaagttcaattgctttttctgtatcaaatttgtaatttccatcctcgagatacacacattgtgaaacaatgctgaaaaattctgatgtcgattcccagagtgtagcaattacctgagcctcttcttttgtcattcctaactcgacagctttttcgctgtcaaaataatatacaccgtcttgttcgtaaatacattgatttaatatatcaatgaatgtattgagatcttcgttagtgctcgcctgatgctggagttgaacagcagtgttatcaaccggtgtttttgcgctggctgcatcagaaccgaacgttaatagagcagctgaggtcattgcggcagtcgttaacatagctttttttacaaatgttttcttcatgtttcttctctcccttttatgaattgtgctacaaattccattatagggagtagtttccggtgaaggaataggcgctatggtattttatgtgtatcgttgccgaactactttttgaaggctgcacgtgtgatcgttagaacgattgtctatgtatgaaggctgttttgcatcttcctgactaagaaacaggggagataaggcttaaagaaatgaaaaacaccgctttctttgcggtgttttttgattacaatgtcgccggcggggcaatgcttttaatcaagcaagccttgttcgcgcattttcttttttaatgtaaatccgccgcccatgacagcgcaaacaagtacaatgctggcgataatgcctgcagggcttttttcagcgataaagacgccgatcagcataatgctgaaaaccgctgcaaatgcaaataatagtaaaagccaattcatttttttcataaattccatccccttttacgtcttatattaagtttacagaaaaacgtgacgcttttaaagaggatgtgtgatataatatgaaagttatctaatttttttaggagatgaaaaagtgaaacttcgaaatgatcttcgcaacatcgcgattattgcccacgttgaccatgggaaaacgactctagtcgatcagcttttacatcaggctggtacgttccgtgccaacgaacaggttgctgaacgcgcaatggactctaatgatcttgaacgcgaacgcggcattacaatattggcgaaaaatactgcgattaactataaagatacacgtatcaatattttggacacccctggacacgcagactttgggggagaagtagaacggattatgaaaatggttgacggcgtagtgcttgtcgttgacgcatatgaaggctgtatgcctcaaactcgttttgttctgaaaaaagctcttgagcaaaacctgaaccctgttgttgttgtaaacaaaattgaccgtgactttgctcgtccagaggaagttatcgatgaagttctggatctgttcattgagcttgatgccaatgaagagcagctcgagttcccagtggtatatgcttccgcgattaatggaacagcgagtcttgatccgaaacaacaggatgaaaacatggaagctttatatgaaaccattattaagcatgttccggcacctgttgataatgcagaggagccgcttcaattccaagttgcccttcttgactacaacgactatgtaggccgtatcggaatcggacgcgtattccgcggcacaatgaaagtcggacagcaggtttctcttatgaagcttgacggaacggcaaagtcattccgtgttacaaagatttttggtttccaaggcttaaagcgtgtggaaattgaagaagcaaaagcgggagacctagttgcggtttccgggatggaagatatcaacgttggtgaaacagtatgtcctgtagaccatcaagatccgcttccggtgcttcgcattgatgagccgacacttcaaatgacatttgtcgtgaataacagtccgtttgcaggccgtgaaggcaaatatgtaacggcccgcaaaatcgaagagcgtcttcaatcacagcttcagacggatgtgagcttgcgtgttgagccaactgcttctcctgatgcttgggttgtttcaggacgcggtgagctgcacttgtcaattttaattgaaaatatgcgtcgtgagggctatgagcttcaagtgtcaaaacctgaagttattatcaaagaaatcgacggcgtacgctgtgagcctgttgaacgtgtgcaaattgatgttcctgaagagcatactggctctgtcatggaatcaatgggtgcccgcaaaggcgaaatggttgatatgatcaacaacggaaacggccaagtccgtctcatctttacagttccttcccgcggattgatcggttactctacagaattcctatcattaacacgcggattcggtattttgaaccatacgtttgacagctaccagccgatgcaggcgggtcaagtcggcggacgccgtcaaggtgtacttgtgtcaatggaaaacggaaaagcaacatcatacggtattcaaggaattgaagaccgcggtgtcatcttcgttgagccgggtactgaagtatacgaaggaatgatcgttggagagcataaccgtgacaatgaccttgttgttaacgtcagcaaaatgaaacagcaaacaaacgtccgttccgcgacaaaggatcagacaactacaattaaaaaagcgcgcatcatgtctcttgaggagtctctagagtacttaaacgaagatgaatattgtgaagtaacacctgaatccatccgtttaagaaagaagatcctcaataagaacgaacgtgaaaaagcagctaaaaagaaaaaaacagcaggattgtcttaatctcgtgcagaatttgaaaagatagaacccgtacgtttacaggggagggaatctttttgaatgacgtaagcgaacgtctgtcgttcttcgccgctctatatcaagtagaccggcagcctgcggcaggcatgtggctgctgtacggcacgatttttgtgttggccgttattgtatttaagcttggatttgctaaacggcttcctgtattaaaatctgcagtggtgtatgtatttttggcgttgggctgcactgttttgacttttttaggggtgtttttgcccgtggcagaaggattggtcgtcgctgcgctgattttaatcacttacaaaatccggctgtatcagtcgaaaaaaggacagtctgcaaaatcataaaagactcagctgaaagctgagtcttttttgtgttctgtatggttaagcggccgctttattttttgactttttcttttttctgctgtcccgggtgaaaagtaaattttcccgttttcagccgttcctctgtttttttggcaatccgatcgtgacattcctggcacatatatgtatggatcgggcggtttcgaagccgtttcgcgatcagggtatcatcatcaattgtttcaattttatcgcaaatagaacatttgaccctcatcatatcacctctttcactaacatgtattatagcacggatcagaagctgtccaaaataagaaaaagctaaagcgcaaggctatagcttagtcattgttgttctttttcatatgatgatcagattgatcgttttgctccttctccatttcctgctgctgttttctatttaattggtcattttgctgctttgtttgcggttcgtcttcattgtcaatcacgtcgttaggcacttcgggaagcactcggccgacaattgcagctaattcatccagtatgcctgttaccggatggccctcgctgatttctctgctcatttcacgaaggcggctgaccgtatcgggatcagcaatgaccactgcgtttgcgccatatcgatcattctttagcgcctgagctacagaatatttaatggtttccactttgcttctgtccaaagtatcatcgacatcaatcccaacaacagcatagcctcccagcacaacggctgttgcatccttgacgtcggggtttttttcagcaacgctgacaagatgcttggcaatatcggttcttgttccattgtcttttgtttcttgagttgtgtcctttacgtgaatcggtttagtctcctgctgtcttgttgattctttttcaacattctgaccctgttttccttgttgataggcacaagcggacaggataagtgtcagctgtatgataatgaaaagaattcgcacttgcgggttccctccttaaaatgctttcattaattttattgttgaattaaccttctatctttatgcacaaaaacatatattttagcaggcattcacctttttcatcaaaagagaagcaggaagaactttgacccttatatcaggaggctgagacttgagtaaaatttatgtgttagatacgaatgtgttgttacaggatcctaacgcaatattttcttttgaagaaaatgaggttgtcatccctgctgtcgttttagaagaggttgattcaaaaaaacggtatatggacgaagttgggaggaatgcaaggcacgtatctaagctaatcgatgcgctaagacaaaagggcaggctgcatgagcatgtaccgcttgacaccggcggcacactgagaattgaactgaatcatcgttcgtttcaccagctgcaagagatctttattgaaaagacgaacgataatcgcatattagccgttgcgaaaaacttaagcctcgaggaagaaaccaaggaaaatggcaggccggttatcctcgtcagtaaggatgtactggtcagggttaaagccgacgcaatcggactgcttgctgaagatttcttgaatgaccgggttgtggacaatgatgaaatgtacagcggctataaagatttatatatcagccagcagctgttcagctctttttacggaaaaaatcaaatttcagtaaacgatgtgaaacagcatgcgttttatccgaatcagtttgctttaatgaaggatgagctaggaggatcctcctcggcagtcggaattgcagataaaaccggaacggtattaaaaagactcgtatttgatgatgaacatatatggggaatcaggccgaaaaatgtacagcagacaatggcattagagcttttgctgcgggaagatattccgcttgtcaccctgatcggcaaagcgggaaccggcaaaacgctcttagctttggcggcagggctattacagacagaagacttgggaatatataaaaagctggtcgtcgcaaggccgattgttcctgttggcaaggacatcgggtatttgccaggcgaaaaagaggaaaagctaaagccttggatgcagccgatttttgacaacttagagtttctgtttaatgcgaaaaaaccgggggagcttgatgctattttggcgggaattggctcaattcaggtagaggcgctgacttatatcagagggagaagcattccagatcaatttattatcattgatgaagcgcaaaatttgaccaggcatgaggtgaaaactttgctgacgagagtcggtgagggcagtaaaattgtcttaatgggtgaccctgaacaaattgatcacccatatttagacagtctgaacaatggtttagcctatgtggttgagcggtttaaaggacaacccatctcaggcagcgtgaagctgttaaaaggtgagagatcaggtctcgcccagctcgcagctgatttgctgtaacattaaatgatttcgatctcttttacgtcggtaatcggctgtttgtgatgaaccgggtcttcaaagtaaatatgcacggggccgccttcttgaatcggcttgcctgcctcactgaaatggacaatactgttcagagcggtttccagagaaacggcggcctttcccgaacttgtgacaaatacacattgcgtcgcagagctgttcggctcagcatttttcaggacagtcccaagtctcattgcgaaactgccgttcatcagtttttgcttctcatattgcttttccgtctttaatgtaggcggcgcaattcgcccctctctgatgacgcgttccggatcaaggtcggattcatccccggctgattgtaaatatatgtcttgactgtcccctttgcggtcaaacgaaaatttgcgatcatcaaaaatccatacgcttggatcaatggtaattgggtatgtaacattgccttttacttggataacgctcatgatatgacccccttctctcaaaattataaaagttttcgcatgaattgtcactttgtgtacaaattatgtgtattgaaatgctgagggaacgagggtgtttgcatggtatgccggcataatgatgagcttgaagccttagtgaaaaaggcgaaaaaagtaacggacaagggggagatagccagctatattcccgccttggcaaaagctgataaacacgacctgtcagtagcgatttattattccaataatgtttgtctgtcagcaggtgacgtagaaaaaacatttacgcttcaaagtatatcgaaagtcctttcccttgctttggtgttaatggaatacggcaaagataaggtcttcagttatgttggacaggagccgaccggtgatccgtttaactcaattatcaagctcgaaacggtgaatccgagcaagccgttaaaccctatgattaatgccggggcattggtagtgacaagtctgataagaggaagaacggtgaaagagagacttgattatttgctttcttttatcagaaggctgacaaacaaccaagagattacatactgccgggaagtggctgaatctgaatacagcacttcaatgattaatcgggcgatgtgttattatatgaagcagtacggcatttttgaagatgatgtagaggcagtaatggatttatacacgaagcaatgcgcgattgagatgaacagcttggatttagcgaaaatcggatctgtatttgcattgaacggcagacatccagagactggggagcaagtcatctcaaaagatgtcgctagaatttgcaaaacatttatggtgacgtgcggaatgtataatgcaagcggggaattcgcaattaaggtcggaattcctgcgaaaagcggcgtatccggcgggattatgggcatttcgccttacgatttcgggatcggcatattcggccccgcattagacgaaaaagggaacagcattgcaggtgtaaagcttttggaaataatgtctgagatgtacaggctgagtattttttaatttatgtcatatgcttaaatcctcttgcattttctgttgataccctttatgataaatagaagaattaggtactcgcctggggaacggagggatacttttggcttcagagatgatagttgaccatcggcaaaaagcttttgaactcttaaaagtggacgctgagaagattttgaagctgatccgagtacaaatggataacttaacgatgcctcaatgtcctctatatgaagaggttttagatactcaaatgttcgggctttcgagggaaatcgattttgctgtccgcctgggattggttgatgaaaaagacggtaaagaccttttatacacattggagcgcgaattgtctgctttgcatgacgcgtttacagctaaataaatgataaaactcaaacttattaacagtttgggtttttttataaccgctatttttctctcatctcataaaagacggtctttttttacacattccttccgaatcgtatagagattcttcgtctcgtttgataaattgtagtaaaataaaaaagataaatacataaaaaccatagataatggaagttagaagcagggaagaggatgttatgttaaaaaaaatgctaaaatcttatgattactcactgatattcgcaatcgttttattatgcggattcggtttagtgatggtatacagctcaagcatgattacggctgtctcccggtatggagtaagcagtaattttttcttcatgcggcagctgtttgctttaattgcgggtggcgctctatttattctcatggcgttgtttccttataaagcactggcccatcaaaagtttcagaaggggatactgcttgtatctgttcttgcgcttatctcactgtttgttttcgggcatgttgccggaaacgcgcagagctggtttaaaatcggcggaatgagtattcagccgggggagtttgtgaaactggtcgtgattttataccttgcagccgtatatgcaaaaaaacaaagttatatcgaccatctgttaacgggagtagcccctccggtagtcatgacgcttgtgatttgcgggttaattgccatgcagcctgatttcggtacagccatgattatagggttaattgcgacgtgcatgatcttgtgctccggtttcagcggaaagacgctggtgaggcttgtgatactgggcggaattgttttcattttagtcagcccgattatctatttgaatcaggacaaaattttaactgaaggccgtttagcgcgttttgagagtcttgaagacccatttaagtatgcaaattcatcaggtttgcaagtgatcaattcttattatgcgatcagctcaggcggcattttcggcctggggctcggtgaaagtatccaaaaatacggatatctgcctgaatcacacactgactttattatggctgtcattgctgaagagctcggcatttttggggtattgtttgtgattttcttattgggttttgtcgtcataaaaggtttttatattgccagaaaatgcgaggacccgtttggaagtcttctggcgatcggcatttcaagcatgattgccatccagtcgtttattaaccttggcggtgtcagcggattaattccgattacaggggttacgctgccatttatcagttacgggggctcttctttggtgctgcttctggggagtatggggatattagcgaatatcagcatgtttgtgaaatattcagagaataagaaaaagaaagagcccttggcgccgaagggaatgaaaaagaaacagctcaaaaaaactgtttatctgtaaaaaacaagtgtgtacaggggaaggatattccgctatgatagattatattccattcgggtaagggggagaaaagtttgtctcagcaatcgatacaaaaagtattagtagcaaacaggggagaaattgcaatccgaatattccgggcgtgtaccgagttgaatattcgtacagttgcggtctattcaaaagaagattccggttcctaccatcggtacaaagcggatgaagcatacttggtcggtgaagggaaaaaaccgattgatgcttacctggatattgaaggtatcattgatattgcgaaaagaaacaaagtcgatgcaattcatccgggatacggtttcttatctgaaaatattcattttgcgagacgatgtgaagaagaaggcatcgtattcatagggccaaaatccgagcatctcgatatgtttggtgacaaggtaaaagcgcgtgagcaggcagaaaaagcgggaatccccgtgattccgggaagcgacggtcctgccgaaacgcttgaagccgtcgaacaatttggacaagctaacggttatccgatcatcattaaagcctcgcttggcggcggcggccgcggtatgcggattgtcagatctgaaagtgaagtcaaagaagcatatgagcgtgctaaatcagaggcgaaagcagcctttggcaatgatgaagtttatgtagaaaaattaattgagaatccgaaacatattgaggttcaggtcattggagacaagcagggaaatgtcgtccatctttttgagagggattgttccgttcaaagacgccatcaaaaggtcattgaagtggcgccgagtgtctcgctgtcacctgaattaagggatcaaatttgtgaggcggcagttgcgcttgctaaaaatgtaaactatataaatgcggggacggtagaattccttgttgcaaacaacgagttctactttattgaagtaaatcctcgcgtacaagttgaacacacgataacagaaatgattactggtgtcgatattgttcaaactcagatccttgttgcccaagggcacagccttcacagcaaaaaagtaaatattcctgagcaaaaggacatttttacaatcggctatgccattcagtcacgggttacgactgaggatccgcaaaatgatttcatgcctgatacaggaaaaatcatggcttaccgctcaggcggcggttttggtgtccgtcttgataccggaaacagcttccagggcgccgtgatcacaccatactatgattcacttctcgttaagctttcaacttgggctttaacgtttgaacaggcagctgccaaaatggtacgaaaccttcaggagtttagaatcagaggcataaaaacgaacattccgttccttgagaacgttgcaaagcatgagaagttcctgacagggcaatatgatacgtctttcattgatacaactcctgaattatttaaattccctaaacaaaaagaccgcggaacgaaaatgctcacttacatcggcaatgtgacagtgaacggcttccccggaatcgggaaaaaagaaaaactggcgtttgacaaaccgttaagcgtaaaggtagacgttgatcagcagcctgccagaggaacaaagcaaattcttgatgaaaaaggtgcagaagggcttgcaaattgggttaaggagcagaaatctgtccttttaactgatacgacattcagagatgcccaccaatcgttattggcaactagaatcagatcgcatgatttgaaaaaaatcgcaaatccgacggctgcgttatggcctgaactattcagtatggaaatgtggggaggcgcgaccttcgatgtagcctaccgattcctgaaagaagatccgtggaagcgtttggaagatcttcgcaaagaagtgccgaataccttattccagatgctgcttcgctcatcaaatgcggtcggctatacgaattatccggacaatgtgattaaagaatttgtgaagcaatcagctcaatccggtattgatgtgtttcgtattttcgacagcttaaactgggtaaaagggatgacgttagccattgatgctgttagggataccggcaaagtggcagaagctgcgatttgttatacgggagatatccttgacaagaaccggacgaagtacgaccttgcatattatacatcgatggcgaaggagcttgaggcggccggagcccatattctcgggattaaagatatggcagggctgttaaaaccgcaggctgcatatgaactcgtttctgcgttgaaagaaacgatcgacattccggttcaccttcatacgcatgatacgagcggaaacggtatttatatgtatgcgaaagctgttgaagccggcgttgatatcatagacgtggcggtcagctcaatggcgggattaacgtcacagcctagcgcgagcggattttatcatgcgatggaaggcaacgaccgccgtccggaaatgaatgtccaaggcgttgaattgctgtcccaatattgggagtcggtgcgtaaatattatagtgaatttgaaagcggaatgaagtctccgcatactgaaatttatgaacacgaaatgccagggggccaatacagcaacctgcagcagcaggccaagggagtaggccttggcgaccgatggaacgaagtcaaggaaatgtacagacgcgtgaacgatatgttcggtgacatcgtcaaggtaacgccttcctcaaaagttgtcggagatatggcactttacatggtgcaaaacaatctgactgaaaaagacgtttacgaaaaaggcgaatctttagatttccctgattctgtcgtggagcttttcaaaggaaatatcggccagcctcatggcggattcccggaaaaactgcaaaagctaatcttaaaagggcaggagccgattacagtcagaccgggcgaactgcttgagccggtgtcatttgaagcgatcaaacaggaatttaaagagcagcataacttggaaatttcagatcaggatgctgtggcatatgccctttatcctaaagtcttcactgattatgtgaaaacgacagaaagctatggagacatctcggtattagatacaccgacattcttctacggcatgacattaggtgaagagatagaagttgaaattgagcgcggcaaaacgctgatcgttaagctgatttcaatcggtgagcctcagcctgatgccacccgcgtcgtttatttcgaactcaacgggcagccgcgtgaagtagtcattaaagatgaaagcattaagtcttccgttcaggaaaggctgaaagcagaccggacaaatccaagccacatcgcagcttccatgcctggaacagttattaaggtattggctgaagcaggcacaaaagtcaataaaggtgatcatttgatgattaatgaagcgatgaaaatggaaacaacggttcaggcgcctttctcaggaacaatcaagcaggttcatgtgaaaaatggtgagccgatccaaacgggagatctgctccttgaaattgaaaaagcataataaacaaagagtgtatatcatttgatatacactcttgtttttttatatagaaaatgtggagtgaaacagatggttagaagagatataaggggacttcagagattatacaatactgtcacaagcccaaaataaatagaggcttatacagccaatattttagatgctttgtagtatgccgtgcatatttctttaagcactatctgatttaaaaggctttaatacttatgttcgcgggctatagatgcatatgaaatttctataatcacgatgagaaaggggacagcccgaagtgagccgctcactgatcatcaagttcagcgaaggctggcgattgaaacaataaagcgccaaaacaagacctgaaaaaagaccaaagccgcctaaggctttggtctttagtccttatgattgactagattcgtaacggaaacgagcaatcaataataagaagtagcatagaacgccaaacagacaggcaataaagaacgagtgggcaagtgcaaagcccagagccagttcagagtatacgatcataatcccggacagtgcctgtaatgtaatgaaaataagacatgagatccatccccaaaagatctgtttttgatctttataggagataatagcatgaacagcggcaacaataatccatacaaataacagtaaggctgctgctctgtggcccatttgcacccattcatggaattgggtcggaagcccattgttcagcgggctgcacagcggcacatcaggacatgccagacttgattcagtgtgtcttacatatgcgcctgtatacacaacgatataggaatatattaaaattcctatcatgtgaaattgcatctttttgccgatttgaagcggcttaaccagtgttctgactgatttatcagcttcaaatatgagcaatgttaaaataagcactgaagcaaaagaaattaatgagatgccgaagtgaagcgccataatcagcgcgttcgaaccgaatacgacagccaatgcgccaagcaatgcctgaagaaataaaaagataattgacatgatcgcgagaaacgttgtttcacgaaaaatcggcgtgatttttctccatgaccaaaacgcaaggcttaacacaaggacaatagagattccgcttgcgaatcggtggctccattcaataattgaagccggattcagttcagggaaaaaacggccgtgacacagcggccactgtctgccgcatccttggccggaacctgtttttgtaacgagggcacccccgattaaaacaattagcatgacaaatgtcgtcagaacaccgagagcttttaatgctttattcatacaatattcaccttcttaacatactgctgcaattttatatacgttccaagtgtaagcgaatatgtgttttgtggcaattcccagagccttttgttcacaaaaatataatagaatgacggcttctggaaaatgtacacttgattattcatgccgggtctgatagaaataaggtaaacgcaatgccgatttggagattgccttcatctttggtaaaattcataaaaagttcacaaataaattcctgtttgtcgtttaatatttaataggatgtttttttacaagatgttatcttgtatgatagagttgcaggttattttattctcctgcgttaggtttgtaagggaggtttacgttatggctaactccagaatcttaaatgatacagctatagacggacaaattgaagaaacaacggcatggaaagattttctgtcccttattaaaatagggatcgtcaattctaacctcatcacgactttcactggaatgtggcttgcactgcatatatccggtttaagttttttaggcaatataaacaccgttcttcttacgttaatcgggtcttcactgattattgcgggctcctgcgcgatcaataactggtatgaccgggacattgaccatcttatggagcgtacgaaagtaagaccgacggttacgggtaaaattcagccgagtcaggcgttatggtctggaattttgctggttgctttaggattgatcatgctgctgatgacaactgtcatggctgctgttatcggttttatcggagtctttacgtatgttgtattgtacacaatgtggacgaaacgccgctatacgattaacacagtagtaggaagcgtttccggtgcagtgccgccgcttattggatggacggcagtggaagggaatatcggtgtcgtagcatgggtgttattcatgattttatttatttggcagattcctcacttcttagcattggctattaagaaaacagaggattacagagctgcaaatattccgatgcttcctgtcgtatacggatttgaagtgacaaaaagacaaattattgtgtgggttgcgtgcctgatgccgcttccgtttttccttggtagcctgggtcttccgattgtcattctcggcttgctgttaaatatcggctggctgattcttggcttaatgggattccgctccaagaatatcatgaagtgggcaacacaaatgttcgtttactcgcttaactacatgacaatctatttcgttgccatggttgtcttgacgcttttctaaaaaatagatatgatgcttgttttatcgcttcaaaataaacgatgacaactagtaaatgccgccttgacctcttgtttaatcaggcggctttacttttatacatagatggcattttgagtaaaaaaactcataatttaagagaagaggaaatgtaagtgctttattggtgataggttggatggcgatagatttcgatccgctttccgcctttgtattgaccagaaaaggggttgggtgaaatggtaaagcattggcgtcttattttattattagccttagtgccgcttctattaagcggatgtggaaaaccttttttatccacgctcaagcctgctggcgaggtggctgataaacagtatgacctgacagtgctcagcacattgattatggtggttgttgttgcagtagtatctgttatcttcttttatgtgattgtgagattcagaagatcacgggtcggtgagaacacgataccgaaacaggtagaggggaataaatttttagaaatcacatggaccgtgatcccgattttgctgctcattattcttgtgattcctgttgtattatatacgctggagctagcggacacatcaccaatggataaaaaaggccgcaaagctgaggatgctcttgtagtcaatgttagggcaaatttatactggtgggagtttgagtaccctgattacggcattatcacaagccaggagctgattgtaccgacagatcagcgtgtatattttaatttaaaagcctctgatgtaaaacattccttctggattccttcagttggaggaaaacttgatacgaatacggataatgaaaataagttcttcctgacatttgattcaaaacgaagcaaagaggcaggagatatgttttttgggaagtgtgcagagctttgcggcccttcacatgcgctgatggattttaaggtgaagacgatgtctgcaaaagaatttcagggctggacaaaagaaatgaagaactataagtctacagcagagagcgatttggctaagcagggtgaagaactgtttaaagagaaaaactgcctgagctgccatgcggtagagccgaatgataagcgtgcagaagccgctagaacggcacctaacttggcgaccttcggtgaaaggacaaaagtggcaggggtgaaagaggccaacaaagaaaatgtgaaggcttggctgaaggaccctgacagtataaagccggggaacaaaatgacaggcacatatccaaagctctcagacagcgaaacagatgcgctttatgaatacttaaaaggcttaaaagcggaaagcaagtagggaagaaagggagatattgggggaggtcacatatgttgaatgcgcttacagaaaagcggacgcgcggatctatgctttgggattatttgacgacggtggaccataaaaaaatcgcgattctttatttagtggcagggggattcttctttcttgtcgggggaattgaagcgatgtttatcagaattcagcttgcaaagccggaaaatgcgtttctcagtgctcaagcgtacaatgaagtaatgactatgcacggaacgacgatgatctttctggctgcgatgccgctcttatttgccttgatgaatgcggttgtgcctttgcagatcggggctcgggacgtttcgtttccatttttaaacgcgcttggtttttggctcttctttttcgggggcattttcttaaatctaagctggtttttgggcggagcgccagatgcgggctggacatcatatgcctcactttcgcttcattctaaagggcacggcatagactttttcgtcctcggactccaaatatcggggctcgggacgctgatagccgggattaactttttggccacgattatcaacatgagggctccgggcatgacgtatatgaggctgcctttgtttacatggacgacatttgtggcctcggcattgattttgttcgcgtttccgccgcttacggttggattggctctcatgatgctggatcggctgttcggaaccaatttctttaatccggagcttggcggaaatacggtcatttgggaacatttattttggatttttggccacccggaggtttatatcctaattttgcctgcattcggtattttttctgaggtcatccctgtgttcgccagaaagcgtttgtttggctattcttcaatggtttttgcaatcgtgctcattggctttctgggctttatggtttgggtgcaccacatgttcacgactggtctcggcccgattgcaaatgcgatttttgcggttgcaacaatggctatcgcgattccgaccgggattaagatttttaactggctgttgacgatttggggaggaaatgtgaagtatacaaccgctatgctgtatgctgtctcatttattccatcctttgtgctcggcggtgtgacgggagtcatgctggcagctgctgcggctgattatcagtttcatgatacgtattttgtggttgcgcacttccactacgtcattattggcggcgttgtattcggccttttagccggtgttcatttctggtggccgaaaatgttcggtaaaattctgcatgaaacgatggggaaaatttcatttgtattgttttttatcggctttcacctcacgtttttcattcagcattttgtcggcttaatggggatgccgcgccgggtttatacgtttttgccaggacagggtctggaaaccggcaacttgatcagtacaatcggggcgttttttatggcggcagctgttattcttctgctggtcaatgtcatatggacatcggtaaaaggtgaatatgtaggtgctgatccatggcatgacggacgtacgctggaatggaccgtttcttcaccgccgccggagtataactttaaacagcttccttttgtcagaggacttgatccgctttggatcgagaagcaggcagggcacaaatcaatgacgccggcggaaccggttgatgatattcatatgccaaacggctcaatcctgccgctcatcatttccttcggcctttttgttgcagcgttcgggctgctgtacagaagtgattacgcttggggtctgccggtgatctttatcgggctcggcatcacatttattacgatgctgcttcgttcagtaattgatgatcacggctatcatattcataaagaggaactgccgaacgatgataaaggggtgaaggcataatgcaagttcaagaaaaattcaccgcagaaacctttccagcttctcctgaaaaagtaaccctggaagggaaaaataaatttttaggcttttggctttttcttggcggagagactgttctgtttgcgtctctcttcgccacgtttcttgcgcttcggaattcaaatgccggtgatccgcctacgacggaaatgttcgatgtgacacttgtattcattgccacaatgcttctattaacgagcagtttaacgagtgtgtacgcgatgtaccacatgaagaacttttccttcggcaagatgcagctttggctgggaattacgattttattgggggcgggctttttaggactggaaatctatgagttcaagcattacacccatgaatttggctttactatcacaagctctgcccttggttctgcgttttacacgcttgtcggtacacacggcgcccacgtggcatttgggcttatgtggatcagcacgcttatgatccgcaatgccaagagagggctgaatctgtatacggcgcctaagttttacgttgccagcctttattggcactttattgatgtcgtgtgggtcttcatctttaccgttgtatatttaatggggatggtgggataaacatggtcgataaaaaaagcagagggcatatcaatagcgaccttgaatttaagaaaaaaaagcatgcccgggagatgaaatatcaagtcctgtcttttggtttaatgatcggtcttacgattgttgcatttctgactgtggccacggacggtgtcggcagctggtttacgattcctttcattattttgctagctgcaattcaagtcatctttcagctgtattatttcatgcatatgaatcagaaagggcatgaggcgccggcactgtttttgtattcaggggtgtttgtcgcgtttatcactgtgcttgcgtttgtgacaattatatggtggtaatttgaacagccgccggaggtgaagaaatgaatcagttggagatatttgggtttcgcgcgatgtggagcccttatcttttttgtatcctgttaggcattacggcgctttatctctatttttacaggcgaatgtcttcaaagccgaatcgaataactggtaaagagatggtgtgctttctgtcggcgatgctgtttttatatgcagccgagggaagcccggttgatctgctcggacatattatgttcagtgcgcatatggtgcagatggccgtcctgtatttggttgtcccgccgcttttgatcgcgggaattcctgcatggctctgggaaaaaatcattttcaggccttcaatcaaaccggttttttcctttttttcgacgcctttaattgctttgcttttgtttaacggcattttttctttatatcatgtaccgcttatatttgatactgtcaaaaccgatccattttaccatacattaatcacttggcttatctttgtgcttgcgttcttcatgtggtggccgcttgttcataaggttgagcgtctacggcagctcagcggcttgatgaagctgggttatattatggcggacggtatgctactcacacctgcttgcgccttgatcatgttcagcggtgcaccgttatacgccacctatacagatccggctttatgggctgaggcaatgaggctttgcgtgccagcggatatgatggggcaggtcccattaacagggccagagatgttgaatacactgcctttgttagaggatcagcagctcggagcagtcatgatgaaaatcattcaggaaattgtgtacggtacttttttggccgttatttttttccaatgggtgaagaaagaaagggaaaaggacgggcaggaggagccgccgtatattcagcagacgatatcataaaaggtacagcgaaatatgctgtaccttttcgttacatttgaactgtttttaacatgttggctatgtcctgaatcagtgccttgctttttgtcacaacctgtacgggaaactcttccgtttctccatattctactccatgcgggtagtaatgctttcctaggagaggggacattaattgaatcacggcgcgcccgcttccgacatcgccttctgccgcaataccttgtatccgcaggtaaaacgtaccctcaatcgtcgaaaacttcttgtcataggtgactctctcgtaatcccattgacccgctctaatgagacctttgctttccattaagtcgtctagccagctgagctcagccttaaccccttcaagtccgctttcagtaaacttcaacactgacccctccttataaaaattacctttcctgacaatcatagtatgaaagcgttaaactttcaatgaatcttcttcttttgaaagtatgcaaaaattaaattttgacgacaatagcactagactaaaggaggttaaacggatgacaaaaataaaagatctgatgacagccgacttgcaatattgcacggtattagataatgtatatgaagctgcagtaaagatgaaggacgcaaatgtaggagcgattccggtagttgatgaggacggggaaacattggtcggcatcgtaaccgaccgcgatctcgtattaagaggaatcgccatcaaaaaaccgaactcgcaaaaaatcactgacgcgatgactgaaaaacctgtcagtgtggaggaagatgcttcagtcgatgaggttcttcatttgatggcatcgcatcagctcagaaggataccagttacaaaaaataaaaaactgactggaattgtcacgcttggtgatctttctttatctgagcaaacgaatgaacgtgccggcagcgccttatcggatatttccgaaggtgataatagagaagaaggcttttttcattaacacataaatctttgacatgttaaataggctgtattgtaatgggatgtaaacaagagattgtgaatcgccacgggggtgatagattgaaaaatatattgagagcaatggttatccttttgattatctgcggaacttatgttctgtttattcaatatggatctgttcctgaaaagaaatcaaatgacagcgagcctcaggtgtcgaatgaggaagcgcaaagcggcaaacgaatacatatgccgacttcagggttattgtccttcatgggcaagcccgccgatgaagtaacgaaaaagcttggggaacctgaacgtattgacccttcggcttatgattacgattggtgggtatacaatcaaggtaaggatcaatatatccaaatcggggtattaaacaataaagtggtcacattattcgcgtcgggtaatgatattaacgccaagcctttcaaaattggagaatcaactggcgaagtatttaagaccacccaggtggcaccatttgtgaatgtagagtataaaggaaattcctatcggtttgaattttctgaagaagatatcaatacaagaccgactgtaaaggtaggaaagatgtatgtccagctgtatatggacaaatttgaggggaagctatccagcattagggcgtttgatgcgcaaacctttgtaaagcaaagaccttatgaggtagtgtaccgcggggaattaattaaaccgaaagccgtttcagatgagaaatggaaaaagatccaaacaacgagcgaaaagcaaatccttgatttgacgaatgtcatacgcgttaaacatggacttgcgaagcttgaatgggatcagccaacggcggaggtggcgtttggacatagtgaggatatgaaggaaaataattatttctcccatgtctctaaaaaatacggctcgctgaaagaccgcttagaagaagggcatgttgactttcagcaagcgggagaaaatatcgcatacaattatgtggacggtccggccgctgtagaaggctggctgaatagcgaaggccatcgaaaagcgttgctgaattcagattatacgcatcttggtgtcggagtagaccggaaatattacacccaaaattttattaagcgatggtaatgaaagccgcggacgaatggttcccggctttttctatttccatacaagctggtctgaatgaatgtgctgatagcttacagataaggccgtttcccattccttcagtcaggctttttcaccagtgtatagggatatcgctaaaaattcatttgggaatgaatataggcgaacacaatgcccgacaaaacgatacattgtagtaggtaacgattttcggagggggtgaggattgtggcgaatcaacatgccaatcattcaatcaatgactttaaacaattcgtcaaaaagcatcccaagctgataaaagaagtgcgcaaagaacaaagaagctggcaggacgtatatgaaaattgggtcctcttcggggagagcgacccgatttgggatccgtatcgggaaccggaagaagcttctgaagctgtgcctgaaacaccgcaaaaaaatgattttgtctcgaaaatggtgacagcggtgaaaaagatggatgtcaatcaaatgaacgaacaaatcaataaaatgagccagtcgatctcatcgttgcaaagccttcttaatacattttccggaagcggacagaagcattctcagccaggctctggacagcatcctttttcttttcgaaaggattaaaaaaggggagctcatatgcgcaaagaggttcaggaatatattttagcaaacgaagaacggaaacgattcatcagagaacagccgatatggtaccgcaggctttcaagaaaaccggatgatctgtcctcctttcagcttgaaatgatgaatttttatgaaaaaaccattccgcatcgggtgaatcagtttacgaacgggattcaaatggcgcaaatgatgatgcaaatgtttcaagcgatgcggacaaaagattaaaaggccccgaaaaagggtcttttttcatgcggacataaggttttgtatacggctgcggttaagcattttccaattggctggtttcatggtaaactaacaactggaggtgcatgttatgtatgcgacgatggaatccgtgcggcttcaaagtgaagctcagcagcttgccgagatgattctgcagtcggagacggctgagaactaccgcaattgttacaagcgtctccaggaagatgaagaggcaggtcggattattcgttcttttatcaaaataaaagagcagtatgaggatgtacagcgttttggcaaatatcatcctgactatagagaaatatcccggaaaatgagggagatcaaacgtgagctggacctgaacgataaggtggctgacttcaagagagctgaaaatgagctccagtccattcttgatgaggtcagcgttgagattgggacagctgtttcggagcatgtgaaagttccgactgggaacccttattttgacggtttgtcttcatgcggaggcggctgcagttcaggcggaagctgcggatgtaaagtgtcctgacgagactggccgtctcgtcttttacatataagagaaaacaggcaggtgattgtattggagaataggcgccagggcatggttgtgtatctgcactccctaaagcagagcaaaatgctgaggaagttcgggaatgtgcactatgtatcaaaacgattaaaatatgtcgtactgtactgtgatatgaaccaaattgaaaaaacaatggacaagattgcgtcttactcatttgtgaaaaaagtggagccttcttataaaccgtttttaaaattggaattcgagtcaaagcttgataaggcaaaagaatacgattataaaatcggcatatagctataaaaaaatccccgcaggcatctgcggggtccttctattccttaatatgttaaggagaaggcaaagggagaggagaaaccggaggaagaacttatggggaaacgtaagtcttctccgcggttggcaacaacatcctctagatgctgttgcttatagtatggacaaggatcatgctgcctatacacctgtttatcaagattagcgttcattgtttggaagaatgctttatgttaagataggattgatttttttctatgtacatagcggcgtccggccgaataaagaaacaaaatagcttttagaaaaagtggtgtggaacatgagagtaatttctggatcaaaaaaaggccgttcactaaaggctgtacccggaacatcaacaagaccgacaaccgacaaagtgaaggaatccattttcaatatgatcggcccttattttgacgggggcatgggacttgacttattcgcagggagcggaggtcttggaatcgaagcgctttcacgcgggtttgagcattgtatattcgttgaccgtgattttaaagcgattcaaacggtaaaatctaatttgaaaacgctggagcttacaaaacatgcacaggtataccgcaatgatgcggaacgtgctttgcacgctgctgctaaaagagaaagcggctttcgcggaatttttctcgatccgccgtataaggaacaaaagctgaaagcacttttaacgctgattgacgaatatcaaatgctggaagaagacggctttatcgtcgctgagcatgacagagaggtcgagcttcccgaaaccgtaggagatcttgtgatgacaagaaaagaaacctatgggttaacaggtgtggcgatttataaaaagagggggtagtgaggtggcgagtatagctgtctgtcccggcagttttgatccggtgacctacgggcatctggacatcatcaaacgcggggcgcatatttttgaacaagtgtatgtatgtgtgctgaataattcttcaaaaaagcctttgttcagtgtggaagaacggtgtgagcttctgagagaagtgacaaaagacattccgaacataacagttgaaacatcgcaaggcctgttaattgattatgcaaaaagaaaaaatgcgaaagcgattttaagaggcttgagagctgtatctgattttgaatacgagatgcaggggacgtcagtaaaccgtgtgcttgatgaatccatcgagacattttttatgatgacaaacaatcaatattcgtttctaagttcaagcatcgtaaaagaagtggcgagatacaacggctcggtatcagagtttgtaccgccggaagtagagctggcgcttcagcaaaaattcagacaaggatgagggttttgactcatcctttttttgttccgtttgtcagtctgtaagaaaaaatgataatgtacgtaaacagcgcgcatagtgtgacagcaggtccgatctgcacaagcagattccagccatttataaaggccgttggcatgtcactgctgttaagagatttaaatacatactgatatggatcatgccatgccgtgtaaagaggtttccataaaagcatgacgaagacagcggcataaacgccctgcagcaaacgtgcgataaagaatggtttaaatctaatgtcggtttccgataaaatacctgccacctgagcttgtacggaaaagccgctaaacccaagaataaagctgacgataatggctttttgcagaagagaaacatctgtctcgctgacaagcttgctgcctaatgtaatttcaaacatccctgataaaagcggaatgtccaattgagtcggaagctgaaacaaagtcagtgctccttttgtgaaaacagacaaaacatcagtcagctggaccactgacaacagccgattgaagacagaaaataaaataataaagccgcctaccataagaagcgtttgaacagaagacgtcacggcgtcgcctaaaattttacctaagggccgtttttctgcaagtctggcggtatgaagagcgtgtaaagcatctttgactgaagggaaaggtatcgttttctttcttctgagatgctgctcttccttgcggccataggagcgcattgttaaaccgacggcaagattccccaaatagtgtgcagaagctaataaaatgcctagtgatgcgttttgaaagaaaccgacggcaacagcgccgaaaataaagagcgggtttgaagaattggtaaacgacgcgagccgttctgcctctactcttgaaatctgattttcctgccgcagacgggcagtgagttttgcgcccgctgggtttcctgatgccattcccatagcaagaacgaagccgccgacacccggcacgcgaaagatcggccgcataaaaggctcaagcaaaacaccgacaaaccgcacaatgccaaagccgattaagagttcggacagaataaaaaatggcagcaatgacggaaacacaacctcccaccacatagacagcccggttttagaggcttcgaatgaggcctgtggatgtgagatgacagtcgctgttaaaaaaagaaaaaacgaggcaatcaaaagtgtattaatcttcgacaagttcattcttacctccccgatgctaaaaatgcccaatgacatgtatatcatgataaaataatgtatgatgtaaaacggccaagcagtacctgtcctcttgattctttgtactaatatacgagcataggggttcagtttagaccatagaattcggtatacagggaattcaggcaggaggttaacgctttggccaaacctaaaatcgggttagcgttaggatcgggaggggccagagggcttgctcatctcggtgtgctttccagtttacataagcaccaaattgaagtggatatgattgcaggaagcagcatgggcgctttggtgggcagtttttatgccgccggacatgacgtggcaacgatgaaaaaagtagccaaagcctttaaacgaaggctttatgctgattatacggtgccgaagctcggttttttaaaaggtgaccgcgtcagacagcttgtgcatgcttatacattcggaaaaccgattgaagagctccaaatcccgctgggcattgttgcgtgtgatctacagacgggagaaaagattgtgttccgaaaaggatcagtgtcagatgcagtgagggccagcatcagcatcccgggtatctttattccgcagcggctggacggacgccttcttgtagacggcgcggtcgtcgatcgaattccggtttctgttgtgaaagacatgggagctgatattatcatcgcttcggatgtttccagggttcgaaaaactgaaacagcagtgcatatttttgatgtgattatgcaaagtatggatatactgcaaaatgaattagtgcggcatcaaacaattgccgcagatatcatgattcgcccttcccttgaaacatacagctcaagctcgtttgccaatattgaagaaatgatatcggcaggcgaagaggcgacaaaccgaatgatcagcaagataagaaaagaaatagagaattgggagggctcataatttgctacgtaaaaaacattttagctggatgctcgtcatcctcatactgatcgcctttttatcatttataaaacttccatactatattacaaaaccgggagaagcgacagagcttgcttcattgataaaagtggagggaggctacccggaaaaaggaagtctgtccttaatgactgttaaagtgggaccggctaatccgtttacatatgtgtgggcaaagatgcacccttattatgaaattgttcctgatgagagcattaaggaggaaggcgagtcagataaggagtatatgaaaagacagctccaaatgatgaaaagctcgcaagaaaatgcggttatagccgcctatcaaaaggcaggaaaaaaagtcagctattcctttaacggcatatacgcaagctctgttgtagaaaacatgccggcaaaagggaaaatagaagtcggtgataaaatcatcagcgcagacggcaaaaactatcagtctgctgaaaagctgattgattatatcagcagcaaaaaagcgggagataaagtcacgttaaagatcgaaagagaagaaaaagaaaagcgtgtcacccttacgttaaaacaatttcctgatgagccggatcgggcaggaatcggagtttcgctttatacagacagaaacgtgaaggtagagcctgatattgattttgaaatcgaaaatattggcggcccgtcagcagggttaatgatgtcccttgaaatctataatcagctgacaaaaccagacgaaacaaaaggctacgatattgcgggaacaggtaccattgatgttgacggaaaagtaggcccgatcggcggcattgatcaaaaagtcgtcgccgcagacaaagccggaaaagatattttcttcgcgccaaatcaaaacggcgccagcaattccgattataagaacgcagtaaaaacagcaaaagatattgattcaaatatgaagattgtgcctgttgataccatgcaggatgcgattgattatttgaataagctgaaagcgaaaagcacctgattctcaggtgctttttctatacatttaaaaagtgttgttcatcttcgtcatatcgaatcggtgcatgtccgtattcctgtaggtcaaactcagttctcagcggctcttctatcggcaggctgtaaatcctgcttgcttttacgtccagatcgagagctggatgggagaaagaggacagtttgctgacaagcggaacagacagtgcttttttcttttcggataaataagcctgtccttttttcgtcatgccgagaagcctgatatacggcgccttatcgttgtcaagcagcttttgcatatcctgtttttttgttctggttaaaatgtgtgtattcatccgctggagccttgtccacgtatagcgttttgttttcagcagttccataaattcctgataggagctggattttctgatcgaacgaataattctgtgctctaaaccttcctccacctcgtatacttgctgtaattcccgtgccgttacagttgaaaggctgtattttaagtaagaaaagtagctttcaggtgtatgccacaatccgaaagatttgcggtaagctgctaattcacgtgcagatgcagcagggagaaaacgaaggcaggcttcgagattctggccaatcatcgcttttctaatgcttgtggcacttgctatatggttttcgccttcagggagatcggcatcatgatagtccgaagagattcgtgccgtagtataaggtttcataggatatcccccggttagaatcgaggtcacatactggtatcccaaaatgttatttggttttgacaagtcaagtgcactttcagtatgcaaaatggagctgaaggcgatagccgccgctgctgggtaactggccccctttttaagttcttctttaattcggtcattcaatatatgtttatgctcatcaataagctgtgctgtttctaaaaaaggcttgatatccccattttcactcccgaaaaacagcgcctcacattcaagttcgttcaggatggaaacactgccgcgtgcaaaaatgtctgctttttgcacggcataaagataaggcagctcaatgacaagatcaactccgctttgcagcgccatttttgttcgggcccattttgatacaacagcgggctccccgcgctgtaaaaaatgcccgctcatgaccgcgacagccgtgtcacatccggtttgccgctttgctgtttgggcatgataaaggtgaccgttatgaaagggattatattcaaccaccaatccgacagctttcatattttttccgcctttcttgctatgtttaaaaacgtatggtacatttgcaaatgaaaactcttacgccttatttttgttttaagtgtatgcatagcatattccgctgtcaacgatacttcaatggcagcattatgctgtaaagaaaaaatattgacaaaaacaatcttaaaagctataatcatgtttgttgctttcctgaggtgatacaaatgaaatggacgatttatcagctgcatcaaatgccaaaacaaagttttgagtttgatgaaacagttgagttaaatgagctgacaaagctgaattctgacattcgccgcatttctcccgtccgggtgaagggcagagcggatatcaaatccaaacaggtttcgtttgattttacaatttcaggcgaaatgattttgccatgctcaagaacactcgttgatgtcccgtatccatttgaaatttcaacaaaagaactgtttatatttcatcacacggatgatatagaagatgatgacgttcacattgttgaggacgatactatcgacttaactccgatcgtgaaagaagaaattcttttagaaatccctatgcaaatcttttgtgaatctgaacaagaaaaaggagctgctcctcaagaaggaaaggattggcaagtcatttcggaagaagacaagaagaatcaagttgatccgagacttgcagccctcgaaaagctcttaaaacaagatgatgaatcttaactctttaaggaggtgggaataatggctgtaccttttagaagaacttctaaaatgaagaaaagattgcgccgtacacatttcaaacttaatgtacctggtatgacagaatgtccgtcatgcggagagatgaagttgtctcaccgtgtatgcaaagcatgcggatcatacaacggcaaagacataaatgtaaaaagtaactaataagaaaagcgcggggtgaaaagccctgcgctttttctttttctcttcctgtcagcttgcggaaaatttgtgagtgcaaatagtctatctaatctattaccggcatatgtatgagataaataagctgacatggagggagattgaatttgaccattacaagacaagatgcttggactcaggatgaggatttgctgctggcagaagtggtgcttcgtcatattcgagagggaggaacacagctttcagcctttgaggaggttggaagggcgctgaccagaaccgcggcagcctgtggtttcaggtggaactcgtatgtgagaaaacaataccagtcaggtatagagcttgcaaaaaagcaaaggaaagaactgagaaagcaaatcggtgttcattcggtcaatatgccgaattccatgaagcagactgcctcggcatcgtcagaaggaaaacgagatttgtccattcaggatgtcattcaatttctcgaacaattcaaagaagcaccgtctgcacaagaatttcagcttgaaagggaaaaattgaaggagcaaatccaatcgctgcaaaaagagcttgaggatttgcggagtgaaaatcagacattgcggaatcagctagagatgacagaagaggattacaaggcactgatcgatatcatggatcgggccagaaaaatggttgtttcgaaggaagacggaagaatgaaaaaagcggctcaagaaacgtaaagaaacgcctgaaatgaaccggccctatagtaagaataggccggttgttttgatttctatgcagactctcccggtgtcatttcatgatccatatcaggatgccagatgagcgggttttcccctttgtcccgcgccatatcatacttaacagttttaaagttcattttgttccaaaattccgctgatttcattctcggatttgtccggatcggcattttgaatgattttgcaaattcaaccaaggctctcccgtatcccctgttctggtagcccggaagaacctcaagcttccacagctccaaataatcctggcggttgtcaaaatagggattcgatttgccgttaacttgatacagactcattcgtgctacaagtttatcgccaaaataaatcccgtaaaaaggcgaagtgctgtcattttcaataatattatcctgaagttcttcaagcattgaaagctcctgaatgccgtattctttgaatttcttgaattcttccagcgttttatagttgataagcagacgttctacctttgtcaaacaaatctccccctttgttgtttctacatatattgtaaacgctttatttaaaaaatccaaatatttaaactttaattttaagcacatgggatctttgagaagtaatttcttcttacttctgctatgataatacgtaaatgctaaattgggtgtgacatcatgaaaattggaattatcggcggaggctccgtcggtcttttatgcgcctattatttgtcactttatcacgacgtgactgttgtgacgaggcggcaagaacaggcggcggccattcagtctgaaggaatccggctttataaaggcggggaggaattcagggctgattgcagtgcggacacgagtatcaattcggactttgacctgcttgtcgtgacagtgaagcagcatcagcttcaatctgttttttcgtcgcttgaacggatcgggaaaacgaatatattatttttgcaaaacggcatggggcatatccacgacctaaaagactggcacgttggccattccatttatgttggaatcgttgagcacggagctgtaagaaaatcggatacagctgttgatcatacaggcctaggtgcgataaaatggagcgcgttcgacgatgctgaaccagactggctgaacatcttgtttcagcataaccattcggattttccgatttattatgagacggattggtaccgtctgctgacgggcaagctgattgtaaatgcgtgtattaatcctttaactgcgttattgcaggtaaaaaatggagaactgctgacaacgccagcttatctggcttttatgaagctggtatttcaggaggcatgccgcattttaaaacttgaaaacgaagaaaaggcttgggagcgggttcaggccgtttgtgggcaaacgaaagagaatcgttcatccatgctggttgacgtcattggaggccggcagacggaagctgacgccattatcggatacttattgaaggaagcaagtcttcaaggtcttgatgcagtccacctagagtttttatatggcagcatcaaagcattggagcgaaatacaaacaaagtcttttgagctttttcggtaacatgctatactcatttcggatcactaactatttattggagaaaggaagttctagaagatgcagctaactgaactttccatcaaaaatcagaatgtgtttgtacagcactatatagatggcaaagaagaaatgtcttcttttttgattacagtattcatcataaggacatgtggcgcgaaagaatggaagacttatcttcccggtttttcgcaagagaggaattggcggcgtacttaacctcttaccataataaattcggttcaagtgcgatgcagtctgccattgagaagctgaaggacccgtcaagtgccgcagtagtcggcggacagcaggcaggacttttaacaggaccgctttacaccatacataaaattatttcaatcattgttttagcaaagcaacaagaaaaggaactgcaagtgcctgtcataccaatcttctgggtggctggagaagaccacgatttggatgagattaattttgttcacacatctgaagagaatggacctgtgaaaaaaaagctgcctcagtcttattggaagaaatcatcagcagcgagtacatcgcttgatcaggaaaagtgtgccgcgtggatagatgatgtttttgccgcttttgaagaaacagaccatacgaatacacttctcgacaatgtgaaacgatgtttaagggaatctgttacgtttactgacttctttgaactgctgattgcggatttgttccaagaagagggcttagttttattaaattctggagatccggggattaaaaagctggaaacggccatgttccaaaagattcttcgagaaaatgatgaactcgcccgcgctgtatcagatcagcaggccttcatgcgtcaagcaggctacaaaccgattatcgagtccggaaaagagcaggcgaatctgttttatgaatacgaagaagagcgttttttaattgaaaaagacaacggccgatttgtcatcaaagagcttgatctaggatggacgagggatgaacttcatacacatatggaagaacatccagagcgtttcagcaacaatgttgtaacgagaccgttaatgcaggaatttctcattccgactttagcatttattgcagggcctggggaaatcaattattggggcgagctcaaacaggcttttgcggtgatgggcttcaaaatgcctcctgtcatgccaaggctgaacattacgatacttgagcggcatattgagaaaaaactggctgaacggaatatctcattacaagacgcgattgagcgcggaacggagaatcaaagagagacatacttcgagcgccagattccggaagagtttacggcggtgatggatcaggcgaaaagccaaattgaagcgattcacaaaacggtccggcaggaggcgttaaaggttgatcaaagcatggaacctttactcctgaaaaatgccgcttttattcaggatcagcttcaattcttagagcgcacggtgacgaagcgaattgaagaaaaagaaggctacgtcttgaaggattatgaaagaattcaaaatagcattaagccgcttcttgcgccgcaagaacggatttggaatatcatgtattatttgaacaggtacggtccaaaattcttcacgacattcaagaatctgccattttcttttcaaaatcaacatcaagttgtcaaactttgaaataaagttttaaagaaccctgaatagttcagggtttttttttatgggtaaacagtgtaaaatgaagttgtggagcgaagtggtgaatagtggtgagttaaggagagaaagtggggcaagagatcatgtttatgggtgaatatcagcataccatcgatgcgaaaggccgcatgatcgtacccgctaaattcagagaaggcctaggtgagcaatttgtgctgactagaggacttgaccaatgtctcttcggctaccctatgcacgaatggaaacaaattgaagaaaaactaaaagctcttcctctcacaaagaaagatgcccgtgcgtttacccgtttcttcttttcaggggcgactgaatgcgaactggacaagcaaggcagggtaaatatcgcatcatctctattgaattacgccaaactggaaaaagaatgtgttgttatcggggtttctaatcgaattgaattgtggagtaaagtaatttgggaacaatacacagaagagcaagaagattcatttgctgaaattgctgaaaacatgattgggtttgatatataatgattcttcgtgtataacactctaaaagcaatttcaattcatcctgataaaaggtgggaccaacacaatatgtttcaacacaagacagtacttcttcgtgaaaccgtagacggactcaatattaagccggacggtacatatgtagactgcacactcggcggagctgggcacagtacatacttattgcagcagttatccgagaaggggcgtttaatcgcttttgaccaagatgatacggcattacagcatgctaaagaagtgttgtccgactataaaggacagctcattctgattaaaagcaatttcaggtatttaaaagaatgtttgaatgaacaaggcattacagaagtagacggtattttatttgatttaggggtgtcctctccgcagctggatacaccggagcgcggattcagttaccatcatgacgcaccgttggacatgaggatggaccagtcggctacgcttacggcgaaagaagtcgttaatgagtggcgctatgaggatctcgtccgtattttctttaaatacggagaagagaagttcagtaaacagatcgccagaaaaattgaggaggcaagaatgaagtctcctattcaaactacgggccaactggtcgatctaataaaagacgcgattcccgctccagcgagaaggagcggcggacatcccgctaaacgcgtgtttcaggcaatcagaattgccgtaaacgatgaacttagggtgtttgaagaagctttggagcaggcaattgaggttctgaagccagggggcagggtatcagtcattaccttccactcgctagaagacagaatttgcaaaaccacttttaaagaaaagtcgtcgcttccagaacttcctccgggacttcctgttataccggaagagtttgaaccggagctgaagctcatcacacgaaaaccgattacggcaactcaagaagagcttgaagagaacaaccgggctcgttctgccaagcttcggattgctgaaaaaagaaaataacgaaacgcgaacgcaaaattaaaaggaggtcatcagcctatgagcaatttagcttaccaaccagagaaacagcagcggcatgcgatcagtcctgagaaaaaagtgattgtcaagaaaagggcttccattactctcggagaaaaagtgcttcttgtcctctttgctgcggcggtgctcagcgtatcgcttttgatcgtatcgaaggcgtatgcggcatatcaaaccaatattgaggtgcaaaagcttgaggagcaaatttcatccgaaaataagcaaattggtgacctcgaaaaaagcgttgctgatttaagcaaaccgcagcgcattatggacattgcgaaaaagaacggcttgaatttaaaagataaaaaagtgaaaaacatacaggaatgattcaaatgccaaaaaagaataaatttatgaatagaggagcagcgattctaagtatttgtttcgctctctttttctttgtcatcctggggagaatggcatatattcaaataaccggaaaagcgaacggcgaagtgcttgcgacaaaagcgacagagcagcatgaaaagaaacggaccatcgaagcgagccgcggctcgattttagaccgaaaaggaaaagtcattgcagaggacacagcgacgtataaactgattgcgattctcgataaaaaaatgaccactgatgtcaagcatcctcagcatgttgtaaacaaagaaaaaacggcagaagcattgtctaaagtgataaacttggacaaggccgacatccttgatatcttaaataaggaggatgcaaaacaagtcgagtttggctcagctggccgggatattacgtattcgcaaaagcaaaaaatcgaaaagctgaaactcccgggcatttcatttttacgggatacaaaacgctattatccaaacggtgtttttgcatccaatttaatcggctatgccgaggttgatcaagacacaaatgaaatttccggcgcgatggggttagaaaaagtgctggataagtatttgaaggagcgggacggatatgtgacatatgaaagcgacaaatccggctgggagctcccgaacagcaaaaataaaattacagcgccaaaaaatggtgacaatgtatatttaaccattgaccagaaaattcaaacctttttggaagacagcatgacaaaagtggcgcaaaagtataatccgaaaaaaatcatggccgcagttgtcgatccgaaaacaggcaaagtccttgccatgggacagcgaccaagctttgatccgaacaagcgggatgtgacaaactactataatgatttgatttcatatgcgtatgaacccggatcaacgatgaagatatttacactcgctgctgcgatgcaggaaaacgtgtttaatgcgaacgaaaaatataaatcaggtacgtttgaagttggcggggaacctgtcagggaccataatagaggtataggctgggggccgacaacctatcatgacggcgtccttagatcgtcaaatgttgcatttgcgaaactggcgaaagaaaagctgggatatgaccgtcttaatcaatatttacacaaattcaatttttatcaaaaaacaggtattgatttgccaggagaagtctctagcaaaatcaactttaaatatgaatttgataaggcgtcaaccgcatacggacaagcgtctgcagtcacaccaattcagcagcttcaggccgcaacggcaattgcgaatgacggcaaaatgatgaaaccttatgtgattgaccatatcgttgatcccgataaagataaaaccatctatcaaaataagccagaatcagccggaaccccaatttctgcaagcacagcgaaaaaggtgcgggatatattgggagaagttgttacgtcgaaaatcggaacagggcaagcctataaaatcgaaggatttgatgttgccgggaaaacaggtactgcgcaaatagccggtaaaggcggatatctagacggaacagatgactatatcttttcgtttatgggtatggcaccaaaagatgatcctgagcttttaatttatgttgctgtacagcagccgcaactcaaagcaggacaaagcagttcagatccggtatcagaaatcttcaacccgacaatgaaaaacagcctgcactacctgaacattgaaccaactgaaaaatctgactcagataaggaagaaacaaaagcgcagacaatgcctgatttaacagatcaaacggtagctgctgctcaaaagaaagcaaaagaggagaatctcacaccaattgtcatcggcagtgatgtcgctgtaaaagaacagtatccgaaagcggatgaggaagttctcaccaatcaaaaggtcttcctgaaaacgggcggcaaaatcaaaatgcctgatatgacaggctggtcgagaagagaggttctgcagtacggcgagctcgcgggaattcatattgaagtaaacgggcaaggctacgctgtcagccaaagtgctaagaaagacaaagaaatcaaagacaaaaccgtaatcaaggttaagtttaaaaatcctgattaaaaagaaagcttgcgttatgcaggctttctttttttatgccttcagaggagcatcgttctacctgtccaatttcaggcataaaatgaaacaagcctaaataaggagtgaacggtctcttgcgcgtctcgaatgtaacggttagaaaacgtttattatttgttttgctttttggcgtgatcgtgtttctgatcattgatacaaggctggggtatgttcagtttgtgatgggcgaaaaactgacttcgctggcgaaagattcctggagccggaacttgccgtttgagccggagagaggcgagatactggatcggaatggtgtgaagctcgcaacaaacaaaagtgcgccgaccgtattcgtcgtgccgcgccaagttcagaatccgatgaaaacgagcaagcagcttgcggcggtgctcaatatgtcagaagaaaaagtatataaacatgtgacaaaaaaagcgtcaatcgaaaagatcactcctgaagggagaaaaatttcaaatgagaaggcgaaggaaattaaagcgcttgatttaaaaggtgtgtatgttgcggaggacagtatccgtcattacccgttcggcagctttttatctcatgtgcttggatttgcaggaattgacaaccaaggactccttggattggaagcctattacgacgatgatttaaaaggggaaaaaggttctgtcaagttttatacagatgccaagggtaaaaaaatgcctgatgaagcggatgactatacgccgcctaaggatgggcttgatatgaagctgacggttgattcaaaggttcagacgataatggaaagagagcttgataacgctgaggccaaatatcatccggacggcatgattgccgtagccatgaatccgaaaaacggagaaattttggggatgtctagcaggcctgacttcgaccctgctgattaccaatctgttgatccgtccgtctacaaccgaaatctgccagtatggagcacgtatgaaccgggatctacctttaaaattattacacttgcagcagcccttgaagagcaaaaagtaaatttgaaacgggatcaattttatgataaagggcatgcggaagtggacggagcgagactgcggtgctggaaaagaggcgggcacgggctgcagacgtatctggaagttgtgcagaactcctgcaacccggggtttgttgaattaggcgagcgcttaggaaaggaaaagcttttcaaatatatcaaagactttggttttggacaaaaaacggggattgatctccaaggcgagggaacaggcatcttattcccgcttgagagagtaggcccggtggagcaagcaactacggctttcggacagggagtatccgtcacgccgattcagcaggttgcagcagtctccgccgctgtaaacggaggaacgctctacacaccttatattgcaaaggaatggatcgatcctgttacgaagaaaacggtcaaaaaacaatcaccaatcgcaaagaaacaagtcatttctgaggaaacatccaaacaaatccgctatgctctagaaagcgtcgtcgcagaaggaaccggccgcaatgcatttgtagaaggatatcgtgtcggaggaaaaacgggaactgcacaaaaggttaaagatggaaaataccttgaaaacaaccatattgtatcatttatcggtttcgcgccagctgatgatccgagtctagtcgtctacgttgcggtggataacccgaaaggcacgattcaatttgggggaacggttgcagcgcctattgtcggaaatattatgagagacagtctgccggaacttggtgtgaagccccggaaaaatcaaatcgagaaaaaataccaatggaacgacacaaaaacaatagaagttccgaatgttgtagggatgtctgtctcagatcttgagtcactattggtgaatctcaatgtggatgcttccgggaaagggagcaaaatcgttaaacaatcgccagctgccggaacgaaagtaaaagaaggctcaaagatacgcgtgtatttgactgaagaagatgaaaaggaggcagccgattgattcgggctgcctattcttttattgcagaaaaaatgctgatatctttcaagattagctggatgtatccttttatttacgctaaaatatgaactgtatgcttaaaatcattaccacatcatttgatgtgacttcaatgataaaaagaacgaattagaatgttgagaggtttgatacgatgaaacttacaaagctgcttacatacttaacaaccgaaccttctgtaaacgactcacaagaccctgaaataacttcaattgagatggactccagggaagtaaagaaagggagtctttttgtatgtgtaaaagggtatacggtggatggccacgattttgcgcaaaaagcagtagaaaacggtgcagcggctattgtggcagaaagagaggtcgatgtgaatgttcctgttattattgtccggcagtcacttcgcgcgctcagcgttttgtctgatgcgttttacggacagccgacgaagaagcttcagctgattgggataacagggacaaacggcaaaacatcaacgacccacatggtcgatgagattctgaaaaaagcgggaaaacgcacaggcttgatcggtacaatgtacatgaaaatcggagacgaaacacttcctgttaaaaacacgactccggaaagcgtcacgctgcagaaaacgtttaagaaaatgaatgacaagcatgttgacactgcaatcatggaggtttcttcccacgctttgtctttaggacgcgtccatggctgtgattatgatattgccgtgtttacgaatttaacacaggaccatctggactatcataaaacgatggatgagtaccggcatgcaaaaagcttgctcttttcccagcttggcggggctttcaaccatgaacatccaaagcgtgccgtcctgaatgctgacgatgaggcgagcgcttattttgaaaaggtaacagctgcgcatatctctacatacggaattaaaaacgatgctgatgtgatggcgaagaacatcagtatcactgcacagggcacaagctttgatctcgtgacaaacaaaggcacgaagcacatcacgatgtctctcgtcggacaatttaatgtgtataacgtgctggccgctgttgcgacatgtattgcagcaggcataccgtttgaaatcatcactgaagctgttgaagaattgcatggtgtaagaggccgttttgaattggtcaatcagcagcaggagtttccagtcattgtagactacgcgcacacaccggacagccttgaaaatgtgctggagacatgcagagacatgacggaaggaaagctatttgtcgttgtcggctgcggaggagacagagataagacgaagcgcccgaaaatggctaaaattgctgtggagctggctgacgagccgattttcacgtcagataacccgagaagcgaagatcctcgcgcgattttaagagatatggaagccggagtagagaacgcatactatcacagtattgcaaaccgcgagcaggcgatctttttcgcaattgccaatgccaaaaaaggcgacgttgtcctcattgcgggaaaaggacatgaaacctatcagcagatcggaaatgaaactttcgattttgatgatgctgaagtagcggcgagagccattgttgaactcaataagaataagacgaattcataggaaagagatgttactgaataatggagcttgaaaagatttttcatatggaaaaaaatcatgaatatgataactacgtatgtcgtttgaaagaaacaggaggagaaaaggacaatgcttgagcaagtcattctgtttacaattttaatggggtttttaattagtgttctgctctctccgattcttattccgtttttaagaagattaaaattcggccagagtattagagaagaaggaccgaaatcacatcagaaaaaatcagggacaccgacaatgggcggggtcatgatcatactttctatcatagtgacaacaattgttatgacacagaagttttcagaaataagccccgaaatggtgctgcttctgtttgttacgctaggctacggtttgcttggctttttagatgattacatcaaggttgtcatgaagcgcaatcttggattgacatcaaagcaaaagctgatcggacaaattattattgcagttgtattttacgccgtgtatcattactacaattttgcgacggatattcgcattcctggaactgacttatcatttgatcttggctgggcttactttatccttgtgctctttatgcttgtcggcggatcaaacgcagttaacctgactgacggccttgacgggttattgtccggtactgcggcgattgcctttggcgcctttgccattctggcatggaatcagtctcaatatgacgtagcgattttctcagttgccgttgtcggtgcagttctgggcttccttgtatttaatgctcatccggccaaagtttttatgggagatacgggatcgcttgcattgggaggagccatcgttaccattgccattttaacgaaattagagatcctgctggttatcatcggcggtgtattcgttatcgagacattatctgttattttgcaggtcatcagctttaaaacgacaggtaaacgaatctttaaaatgagtccgcttcatcaccattatgagcttgtcggctggtctgaatggagagtagtcgtgacgttttgggctgcgggacttttgcttgccgttttaggaatttacatcgaggtgtggttataagtggaaaatgatcaatttttacagaaacagcattttttaatccttgggcttgcgaaaagcggatatgcggcggcctccattcttcatgaaaaaggcatttatgttgcagtcaatgaccaaaagccttttgaagaaaatgaaccggcacaaaagctttctgaaaaaggaatcgaagttgtttgcggagagcatccagtttctctgttcgatcagcatcaaatcacgattctgatcaaaaacccgggaattccttatgaaaatattatggttcaggaagcggagaaacgaggcattccggtttggacggaaattgagctcgcttactacctgaccagcgccaagtttatcgggattaccggatcgaacggtaaaacgaccacgacaacgctaatttacgaaatgctcaaagctgactcgcaaaaagcactgattgccggaaacatcggcacagtcgcaagtgaggttgcctatcatgctgatggagatgaatggatcgttaccgaactgtcttcgtttcagctgatgggaacacacgctttcagaccggaaatcagcctgattttaaatgtatttgacgcccatctggattatcaccatacgcgcgaaaactatgaaaaagcgaaacagaaagtgtaccttcatcagactgcttcagataaagccattgtcaaccaggatgatgaaaccgtcgtgcgtcttgctgaagccggaaaagccgaaatcgtcccgttttcagtcagcaaaacgcttgaacagggcgcatatgtaaaagacagtatgattatgtttaacggcgaagccattcttcctctggaagaggttgtactgcccggtgctcataacctggagaacattttagcagctattgcagttgtgaaaacggcaggagcatccaatgaggcggttaaaaaggtgctgacaagctttactggtgtgaagcaccgcctccaatatgtcacaactgtgaatggccgcaaattttataacgacagtaaagcaacaaacattctggcgacaagcaaggcgctttcagcttttgacaagccggtcattctgcttgcgggcggactggatcgcggaaatggttttgatgacttgaaaccttatatgaagcatgtcaaagcagtgcttacatttggccagacggcgccaaaactcgagaaactcggcaatgaactgggaatacaacatgtcaaacgtgtcgataatgttgaacaagcagtatctgcggcgtttgcgctctcaaatgaaggagatgtcatcctgctgtcacccgcgtgtgcgagctgggatcaattcaaaacatttgaagaacgcggtgacatgtttatagatgccgtgcatatgcttaagtaagggcttgtcttgaagtaaatcggcagccctaatgactttaagcttggggtgtcgattgctttgactactaaaaaaacatcgcctgatttgttattggtcatcattacgttattattattaacaatcggattaattatggtgtacagtgcgagtgcggtatgggcggattataaatttgacgactcattctttttcgcgaaacggcagcttttgtttgcgggaatcggcgtcattgctatgttttttatcatgaatgtcgattattggacttggaggacatggtccaaattgctgatggttatctgctttttccttctggtgcttgttttgataccgggcgtcggaatggtgcggaacggttcaagaagctggatcggagtcggagcattcagcatacagccttcagagtttatgaagcttgcgatgattgcattccttgctaaatttctctctgaaaaacaaaaaaacatcacatcgttcagacgggggttcgtccctgcacttggcatcgtgttttcagcatttttgattatcatgtgccagcctgacctcggaacggggacagtaatggtcggaacttgtattgtcatgatttttgtagccggcgcgcggatcgcccatttcgtctttctcggactgatcggcctcagcggatttgtcgggctcgtactatcagctccatatcggattaagcggattacctcatacttaaatccatgggaagacccgctcggaagcggatttcagatcattcaatcgctttatgcagtggggcccggtgggttgttcggaatggggctcggacaaagcagacagaagttcttttatctgcctgagccgcaaacagactttattttcgccatcttgtcagaggagctgggctttatcgggggaacacttattttgctcctcttcagtgtcctgctgtggagaggaatcagaattgcgcttggtgcgcctgatctgtacggaagctttgtcgcagtcggcattatttcaatgattgccattcaagtcatgatcaatatcggcgtagtcacgggcctgattcctgtaacaggcatcacgctcccgtttctgagctacggaggctcttcattgactctaatgctgatggcagttggtgtgctgctgaatgtaagccgctactcgaggtattaacgaatgtatgtccatgcttcctgtctaacatgaagcttggaaacaattgatgcgataaccctgtccaacaaaacagggttatcgttatgttatagagaaacttagactgggggaaaagaaatgcgaattgcaataagcggaggcggtacagggggacatatttatcctgcgcttgcttttattaaagaagtgcaaagacgtcatcctaatgtggaatttttatatatcggaacagaaaacgggctggagaaaaaaattgttgagcgggagaatataccgtttcgttcaattgaaattacaggatttaaaagaaaattgtcatttgaaaatgtcaagactgtgatgcgttttctgaagggcgtcaaaaagagtaaatcgtatttagcggaatttaagcccgatgccgtaattggaacgggcggttatgtatgcgggccggttgtctatgccgctgcgaaaatgggaattccgactattgtccatgaacaaaacagcctgccgggcatcacgaataagtttctttcaaaatatgttaataaagtagcgatttgttttgaagaagcgaaatcacattttcctagcgagaaagttgtatttacgggaaacccgagagcctctgaagtcgtctcaataaagacgggacgatcaatggctgaatttgggctttctgaagacaaaaaaacggtcttaattttcggcggaagccgaggcgctgcaccgattaaccgcgctgtcattgacatgcaggatgcgctgaaaacaagagactatcaagtgctgtatatcaccggtgaagttcactatgaaaaagtaatgaatgagctgaaaagcaagggtgccgctgataatatggtcacaaagccgtttcttcatcaaatgcctgagtatttaaaggccattgatgtcattgtggccagagccggtgcgacaacgattgccgaaattactgctctcggaatcccaagtgttctgatcccaagtccatatgtgacagcgaatcaccaggaggtcaatgcgagatctcttggccagcataatgcggcgattgtactgaaagaaacagagctcagcggggagaagctgattgaagcgctagaccggattgtactgaatgagcaaacgttaaaggaaatgagcgaacgaacaaagtcactcggtgttcctgacgcggctgcccgtttatacagcgtactcgaggaattaaaaaaatagtagaaaagcaaatggaatgcggaggtttacgatggagaaagtgatacaggaattaaaagaacgcgaagtcggcaaggttcttgcaaatgaaccgctcgcgaatcatacaacgatgaaaatcggcggacctgcggatgtattggtcattccaagcagtatagatgctgttaaagacatcatggacgtgattaaaaaatatgatgtgaagtggacagtcatcggccgcggatcaaatcttcttgttttagatgaaggaattagaggcgtagtgatcaagctgggggcgggtcttgaccatttggagcttgaaggggaacaagtaacagtcggaggcggttattcagtggtccgccttgctacatcattgagcaaaaaaggcctgtccggtttggaatttgctgccggcattccaggatcagtcggcggagcggtttatatgaatgccggcgctcacggttctgatatgagcgagatcctcgtcaaagcgcatattttgtttgaagacggaacgattgagtggctgacaaatgagcagatggatttcagctacaggacatctgtactgcaaaagaaacgcccgggcgtttgccttgaagctgttttgcagctggagcagaaggataaggaatcaatcgttcagcaaatgcaaagcaataaagactatagaaaaaatacacagccgtattcaagcccttgtgcgggaagcatattcagaaatccgcttccgaatcatgccgggaaccttgtagaaaaagcaggcttgaaaggatatcaaatcggcggtgcaaagatatcggagatgcacggaaacttcatcgtcaatgcgggaggagcatcagcaaaagatgtgcttgatctcattgaccatgtgaaaaagacaatccgtgaaaaatacgagattgatatgcacacagaggttgaaatcatcggcggaaatcgctgattcaagttctgactgaagctgttcatatgatatactgtaagcaaacgacaaacggcatcatagtatgccgtttgttttggaatagacagacttttaacagctgtttcatttgaatgaggtgaacaggcaatgaacccgggtcaagaccgagaaaaaatcgttaacattgaagagcggatccctaaaattaaagagcagaggaaacaaaaggcaaaccgccgtctcatttcatttattatgctcttttttattatggtgctgatcattgtgtacctgcaaacaccaatcagtaaagtatcaacaatctctgttacagggaatgaaaatgtatcaaaaaaggaaattatcgacctttccgatattaacagcggagatactgagttttggagtttggacaagcaaaaaacagaaaagaagattcagcaaaataaattagtgaaaaaagcggagatcagcaaatcgcttcctaataaaatcaacattgcaatcgaagaatataaagcgattgcttatttagaaaaagacgatgtgtactatgaagtgcttgaaaacggctcagttctgccaaacgaagtaacgccggatgatgccggaccgattttagtgaattggacaaacgcgaagaagcggtctcaaatggccaagcagctcgatgcgttgtcaaattcgttaaaacagtcgatttcagagatttattatacgcctgtaaaaatggatgaaaaccgtattaagttgtacatgaacgacggttatgttgtcactgcatctattaaaacgtttgcagaccgaatgaagacgtatccttctatcatttctcagctaagcagcaataaaaaaggaatcattcatttagaagttgccacctattttgaagagtttgggaaaaacgataaggctgctaaaaaggaagatgaaaattgaggggcaaatcagcagtccttctttccttgattatgcttatcgcaggctttttgatttcattttcttttcaaatgacaaaagaaaacaacaaaagcgcggctgagacggaagagtggaaaaaagaatatgcgctgagagatgaacttctgaaacaagagaaagaaaataagaagcttgaaaaagaattatatcaaaagcaaaacaaagtccgccaggcggaaaataagctgaagaaagagaagtcggaatactataatgtcctcgaagatacagaaaaatacaggatgtatattggggaagtcggtgtgcagggagaaggcgttgaggtgacattggaagatgcgtcatacataccggaaggggagaatgtgaatagttacatcgttcacgaaagccatatcttccaagtagtaaacgaaatgtatatctcaggagcggcagctgtcgccgttaatggacagcgtttgacgcatgattcgtatatcaaatgcaatggtcctgtggtaacggtagacggggtgcagcatcccgctccatttacggtatccgctattggagatccagatgtcctgctgccctcgttaaatatcgctggaggcctaattgatcagctgtcaatggatcatatttctgtgtcggcagaaaaagagaaaaacgtacaaatgaaaccgattctgaaaacgaaggaatgactgaaaaagcgggtgaaatagattgaaaataaagcgttccttcataagcatcagtgtgcttatggtcatcttcggcctgatgatatctgttcagtttaattcgttaaagcaccccaaagtccgggatacaagagatatgtgggatattagggaagagctgacatcagagcagaagaagcaggaaaagctgctgtctgaaataaacaaatatgacaaacttctgaatagctattcgcaaacgaaagaaatgacaaaagaaaccgcgctaaataataccttgcaatccttaaaaaaaacagccggcatgaccgatataacaggtagcggaattgtcattacgatttccccgcttttttctgaaagcttaacaggagagccggtcgaaaatccgcctccggatttgctgaaaaagctgattaatgaactcaactcctacggtgcagagcatatctcgattaacgagcgaagagttgtgaatcatacagttatcagagatataaacggcactacaaaaatagacggatacgcccttgacgattatcctttaacagtaaaagtgcttgccaaagatccggacatgttacacagcggagtgaaggggtcaggccttgaggatctttttgcatctgaaaatttagcattaaaagccggtaaatctgaaagcaaactaacattaaaagcatatgacagaccactggacgtacaacagctgaaactgcttaaagactgaaaaggaggagaattgtcatgtggctgcccgtgttgggactggtgctcggaatagcgattggactaatgacaaacttaacgataccgagtgaatactcaaactatttatcgcttgcggtgcttgccgcacttgatacattaatcggcggaatcagagcgcatttacaaggtacatatgatgaaatggtatttgtttccggtttcttttttaatattatattggcaataagtttagcttttctgggagtccatcttggtgtagacttgtatttagcaggtatattcgcatttggagtcagattatttcagaatatagccgttatcagaagaaatctactaacaaagtggactctttctaaaaaaaataaaaaaaatgtgatataaaagaggatatacataggatataacgaatattttcaataaacataaaatgtgaaaagcacataaaaatattctgttgttattttttgttacacacttgtaaagccacattcattgtattgttgttccgcaaataatagaatagaaatgatcgaaatgtgaggaggtgccatagaatgaacaacaatgaactttacgtcagtcttgacatcggtacgtccaatacaaaagtgatcgtcggagaaatgacagatgattcccttaatattatcggtgtgggaaatgtaccgtctgaagggttgaaaaaaggctcaatcgttgatatagatgagaccgttcattctataagaaaagcgtttgaccaagctgaaagaatggtaggttttccgcttagaaaagctattgtcggcgttaatggaaattatatcaatattcaagatacaaacggtgttgtagcagtttccagtgaaaataaagaaattcaggttgaagatgtacgccgtgtcatggaggcggcacaggttgtttcagtaccgcacgaacagctgattgttgacgtcattcctaaacagtttatcgtagatggaagagatgaaatcaccgacccgaaaaaaatgctgggtgtgcgtttagaagtagagggcaccttgatcaccggttcaaaaacaatcttacataacttactccgctgcgttgaaagagctggtattgaaataactgatatttgccttcagccgctggcagccggttctgctgcattatcaaaggacgagaaaaaccttggtgtggctctcattgatatagggggagggtcaacaaccattgccgtattccagaacggacatctcacttctacccgtgtcattcctctcggaggcgaaaatatcaccaaagatatctccatcggattgagaacgtcaacagaagaagcagaacgcgtgaaaaagcaatttggacatgcctactatgacgaagcctcggaagatgaaatatttgaggtaaccgttataggcaccaatcaaaaacaaacatttacacagcaagaagcagcgaatatcattgaagcgagagtagaagaaattcttgaaattgtttcagaagagcttcgcagtatgggaattaccgatctgccgggaggcttcgtgctgacaggaggacaagcagctatgccgggtgtcatgtctttggcgcaggatgtgctgcaaaacaatgtcagagtggcaagcccgaattatatcggtgtaagagatcctcaatatatgacgggagtgggcctgatccaattcgcctgccggaatgcaagaatccaaggcagaaaaataggctttaagatgcctgaagaagcgatacaggaaatcgcagtctcatcatctgaggaacaagagcagcatcatcaccaaaatgaggtgcagcagcggccaaaaggaaaacaaaaaacacaagccgaacataataaacagagcaaaatgaaaaaactattaagcatgttttgggaatagatagatagtcattcggcagattaggaggatttagcatgttggagttcgaaacaaacatagacggcttagcatcaattaaagtaatcggagtaggaggcggtggtaacaacgccgttaaccgaatgattgaaaatgaagtgcaaggagtagagtatatcgcggtaaacacggacgctcaagctcttaacctgtcaaaagcagaagtgaaaatgcaaatcggcgcaaagctgactagaggattgggagcaggtgcgaatccggaagttgggaaaaaagccgctgaagaaagcaaagagcagattgaagaagcacttaaaggtgctgacatggtattcgtgacagctggtatgggcggcggaacaggaacaggtgccgcaccggttatcgcacaaatcgcgaaagacttaggcgcattaactgtcggcgttgtgacaagaccgtttaccttcgaaggacgcaaaagacagcttcaggctgcaggcggaatctcggcaatgaaagaagcggtggatacactgatcgtgatcccgaacgaccgtatccttgaaattgttgataaaaacacaccgatgcttgaagcattccgtgaagcggataacgtacttcgccaaggggttcaaggtatttctgacttgattgctacacctggtcttatcaaccttgactttgctgatgtgaaaacaatcatgtcaaacaaaggatctgctttgatgggtatcggtattgctactggggaaaatcgcgcggcagaggcagcaaaaaaagcaatttccagcccgcttcttgaagcggccattgacggtgcgcaaggtgtcctcatgaacatcactgggggaactaacctcagcctatatgaggttcaggaagcagcagacattgtcgcttcggcatctgatcaagacgtaaacatgattttcggttctgttattaatgaaaatctaaaagatgagattgtggtgacagtgattgcaaccggctttatcgaacaagagaaggacgtgacgaagcctcagcgtccaagcttaaatcaaagcatcaaaacacacaaccaaagtgttccgaagcgtgagccaaaacgtgaggagcctcagcagcagaatacagtaagccgtcatacttcacagccggctgatgatacgcttgacatcccgacattcttaagaaaccgtaataaacgcggctaatgtaaaggacaaaatcgttttcgattttgtccttttttgtttttctcttcacactttccttcttataaagtctttttccctattgcttccttcgcttagtaacaaaacagataattagacctatttatttttgtgacatttctatcattttcatatatatggaaattgaatgacatgaaacgacaatatctgtaattcagattgtctacagttaatatacagcgatgttctgacaaaccattcattattaaaaggagggacgacactttttttaaaaagcatgttgaaaaagggggatgaaaatgaagaaaaaaacgaaaaacagactcatcagctctgttttaagtacagttgtcatcagttcactgctgtttccgggagcagccggggcaagcagtaaagtcacctcaccttctgttaaaaaggagcttcaatctgcggaatccattcaaaacaagatttcgagttcattaaagaaaagctttaaaaagaaagaaaaaacgacttttctgattaaatttaaagatcaggctaacacagaaaaagcggcaaaagcggctgttaaaaaagcgaaatcgaagaagctgtctgccgctaagacggaatatcaaaagcgttctgctgttgtgtcatctttaaaagtcacagccgatgaatcccagcaagatgtcctaaaatatttgaacgcccagaaagataaaggaaatgcagaccaaattcattcttattatgtggtgaacgggattgctgttcatgcctcaaaagaggttatggaaaaagtggcgcagtttcccgaagtggaaaaggtgcttcctaatgagaaacggcagctttttaagtcatcctccccatttaatatgaaaaaagcacagaaagctattaaagcaactgacggtgtggaatggaatgtagaccaaatcgatgctccaaaagcttgggcacttggatatgatggaactggcacggttgttgcgtccattgataccggggtggaatggaatcatccggcattaaaagagaaatatcgcggatataatccggaaaatcctaatgagcctgaaaatgaaatgaactggtatgatgccgtagcaggcgaggcaagcccttatgatgatttggctcatggaacccatgtgacaggcacgatggtgggctctgaacctgatggaacaaatcaaatcggtgtagcgcctggcgcaaaatggattgctgttaaagcgttctctgaagatggcggcactgatgctgacattttggaagctggtgaatgggttttagcaccaaaggacgcggaaggaaatccccacccggaaatggctcctgatgttgtcaataactcatggggagggggctctggacttgatgaatggtacagagacatggtcaacgcctggcgtgcggccgatattttccctgagttttcagcggggaatacggatctctttattcccggcgggcctggttctatcgcaaatccggcaaactatccagaatcgtttgcaactggagcgactgatatcaataaaaagctcgctgacttttctcttcaagggccatctccatatgatgagataaagccggaaatatctgcaccgggcgttaatattcgttcatccgttcccggtcagacatatgaggatggttgggacggcacatcaatggcagggccgcatgtatccgctgttgctgcactgctgaaacaggcgaatgcctcactttctgttgatgagatggaggatatattaaccagcacggctgaaccgctcacggattcaacatttcctgattcaccgaataacggatatggccatggtctggtgaatgcttttgatgctgtatccgctgttacagatggtttagggaaagcggaaggacaagtttctgtagagggggatgaccaagagcctcctgtctatcagcatgagaaagtaactgaagcttatgaaggtggtagcctgccactgactttgacagctgaagacaatgtgagtgtgacatctgtaaagctgtcctacaagcttgatcaaggtgaatggacagaaataacggctaaacgaatcagcggtgatcatctaaaaggaacgtatcaggcagagatcccagatataaaaggaactaaactaagctataagtggatgattcacgattttggcggtcatgtcgtttcgtctgacgtatacgatgtaacagtgaaaccaagcatcacggcgggatataagcaggactttgaaactgcacccggcggctgggttgcgagcggaacaaataataactgggaatggggagttccgtcaactggcccaaatacagcagcatccggagaaaaagtatatggaacgaatttgacaggaaattatgccaactcagcaaacatgaaccttgttatgcctcctattaaagcacctgattcaggaagtctgttccttcaatttaaaagctggcacaatttagaggatgattttgattacggctacgtttttgttcttccggaaggtgaaaagaattgggagcaggctggtgtctataacggaaagacatcaagctggacggacgaagaaattgatttatcggcttataaaggccaaaacattcaagtgatgtttaaccttcaatctgatgaaagcattgcaaaagagggctggtatattgatgatgtagtgctttctgacaaatcagccggaaaaacagtcaaaaagaataagctgggcgtcgaaaagccgtctggaaagcaaaagaaaaagccagtaaatccgaaaaaggctaagccatctgcaaacacagcggtaaaacatcagaacaaggctatacagcctcaagttttgccgctcagggcacaagtcagtgtagtggaaacaggaaaatcaacatattcagatcaatccacagggcagtacacgctgaagcacaaagcgggagactatacgcttatggcagaagcatatggttatcagtcgaaaacacaaaaagtatctttaaagacggatcagacgacacaagctaattttacgttagaagagatgaagaagggcacattaaaaggcatggtcatcaataaaacgacaggagagccggtaacaggcgcttccgtttatgttgtagaggatgctgctgtggaaccggctatgacaaacgacaaaggtgaatatacgctggaggcctatgaaggcgcttatacgattaaagtcgctgcaccgggttattacagtgatgaattttccgttgagttaaaaggtgatgttacaaaagaaactgcattgaagcctttcgtcggttatccgggtgaaattgcatatgatgacggaacagcggagaatgccaattcctattttgctgccggtaacggatgggcggtaaaaatgacgctcgctgacggcaaggacaaaggcatgcttacaggagggctgttcagattctgggatacagagttcccagatccgggcggcacagagtttaaggttgaggtatacgatgccacaggaaaagacggagcaccgggcaagaaaattgcagggccatttaacgctgaagctcttcgcaatggcgagtggactaaggtagatctcagttcaaaagggattatggtcgatagagacttttatctcgtatatatccagtcaaaacctgacccgtattcacctggactggcaatggatgaaaccggcaagaattccggccgcaactggcagtatataggtggacaatgggagccgggtgacgaagcagacggcaactatatgattcgcgcattagttaattatgaagctgctgtacctgagattacttcaccgacagacaaatcatacacaaataaggatagcgtcactgtaaaaggaaacgcttctcctggcacaacggtacacatttataatggagagaaagaagcaggagaaacgaaagctgctgcggatggcacgttccatgcaggcatcatactcaacaagggtgaaaatgagctgacggcaactgcatcaactgacaacggaacaacagatgcctccagcccaatcacggtcacgcttgatcaagaaaagcctgaattaacactggacaatccaaaggatggcgggaaaacaaataaagaaacgctgactgtcaaaggggctgtatccgatgacaatctgaaagacgtcaaggtgaatggcaaaaaagcaacagtagctgatggttcatactcagcccgtattcttttggaaaatggaagaaatgaaatcaaggtaattgctacagacttggcaggcaacaaaacgacgaaaaagacagtcattgatgtgaactttgacaagcctgtcatttccggcttaattccgggagaggataaaaacttaaaagccggtgaatctgtgaaaatcgctttctcaagcgctgaggatttagatgcaacgtttaccattcgtatgccgctgacgaatgcaagagcgagtgtgcaaaatgccaccgaactcccgttaagagaaatctctccggggagatatgaaggctattggactgccacttcttctattaaagcaaaaggagcaaaagtagaagtgatcgtccgagatgattatggaaatgaaacaagaaaaactgcgaatggaaaacttaatatcaacacagaaaattaagtggaaaaaagctgccgtcattggcagtttttttatatcctctcattatacttcctcgacaaattaagcagatttccctgaaaaattgtattttcctctcaacattaattgacagactttcccacagagcttgctttatacttatgaagcaagaaggggaacagcgtgaggcaagaaagaaaggagtcagatgtgaaaatctatttagatgtcatttggctgttaaacttttgttttgatgcacttttgcttttgctcacggcatttattttaaaacggcatgtaaaaaaaagaagactggtaggcggagcgttcatcggttccagtattgtccttttgatgtttactcctttttcgccgattgttgaacatccggctgggaagctagctttttcagttgtgattgtggtggtgacatttggctttaaaagatttcggtttttctttcaaaatttgttttccttttattttgccacttttttaatggggggaggaattatcggagcccattctttgctgcagtcaaattctattgttcaaaacggtgttatgattaccaatcaaacagggtttggagacccgatcagctggttgtttattgttggtggctttccagcattatggtttttttctaaaagaagaattgaagatattgaaacaaaaaacattcaatatgaggaacgagtcagcgtgcaggcagatttgggcagccaaacacttcatgtcagaggcctgattgattccggtaatcagctgtacgatcctcttacaaaaacaccggtaatgatcatttacattgataaattggagccgattttcggaacagccgaaacgatgatcattcgaaacacagacccattggaagccatcgaacagctcgatgattcctttcgctttttagataaaatgaggttgattccatacaggggagttggtcagcaaaatcaatttttattatgcgttaaaccggatcacgtaacgattatgacaaaagaagaaatgatttctgcagataaatgtttaatcggcatcagcacaacaaagctgtcggcagatggagagtttgacgcgattattcatccgaaaatgctttcgggcaaggctgtcaaacacgtttcataatgttcgcaaatgtccgttacttatcatactcaaacggcgtgacatttagaagggagaggaagatgaaaaaactgaaattacggttgacgcacctctggtataagctgctgatgaaacttgggctgaaaagtgatgaagtctattacataggcgggagtgaagccctgccgcctccattatctaaagatgaggagcaggttttgttaatgaagctcccaaacggcgatcaggcggcgcgcgccattctaattgaacgcaatttgcgtctggtcgtatatatcgcccgtaaatttgaaaatacgggaattaatatagaggatttaatcagcatcggtaccatcggtctaatcaaagctgtgaatacattcaatccagaaaagaaaatcaagcttgctacctatgcctcccggtgtatagaaaatgaaatcctgatgtatttaagaagaaataacaaaatccgttcagaggtttcctttgatgaaccgcttaatattgattgggacggcaatgagcttttgctttctgatgtgctcggcactgacgatgacatcatcactaaagacatagaagctaacgtcgataaaaagcttttgaaaaaggcgcttgaacagcttaatgagagagaaaagcaaatcatggagctgcggtttgggcttgtcggtgaagaagaaaaaacccaaaaggatgtagcggatatgatggggatttctcagtcttatatttcgcggcttgagaaaagaattataaaaagattgagaaaagagttcaacaaaatggtgtaaaaaattttatggttagaaccccttgattttacagggatttcctgatttcgacagtttttcggtctgagtgcagtgcatatttttcccacccaaggagatacttaacgttgtacagcagctcctgtagggagggaaaaaagtgtcgagaaataaagtcgaaatctgcggggtggatacctccaaattaccagtactcaagaatgaagagatgagaaagctgtttaggcagctgcaggatgaaggcgatgattcagcaagagaaaagcttgtaaacgggaacttgcgtcttgtcttaagtgtcattcaacgatttaataacagaggggagtatgttgatgacttatttcaagtcggctgcatcggactaatgaaatccattgataattttgacctaagccacaatgttaagttttcaacatacgctgtacctatgattatcggagagatccgcaggtatttacgcgataataacccgatccgtgtctcaagatcactccgggacatcgcttacaaggcgcttcaggtaagagagcggttaatcagtgagacaagcaaggagccgactgcagaagacatcgcaaaagttcttgaagtaccgcatgaggaaattgtatttgcgcttgatgccatccaggatccggtttctctatttgaaccgatctataacgacggcggagacccgatctatgtgatggaccaaatcagtgatgagcgtaatacagattcacaatggattgaagagctggctttaaaagagggcatgagaaggctgaacgatagggaaaaaatgattttgagaaagcgattcttccaagggaaaacccaaatggaagtcgccgaggaaatcggaatttctcaagcgcaggtgtccagacttgaaaaagcggctatcaaacaaatgaataaaaatattcatcaataatgaaaagcctttaaaacgatgttgttttaaaggcttttctattgattatggatggtttacgttttggaaaaagtaaggtatcctagttcgtacaaagttttatgaaaattaaaacaattataaaaggcaataaagaggaggaccacgatgattttgcagcttgacaatgtctcactaaaacggaatgggaaatggatactgagagatattgattggaaggtggaagaaaaggaaaattgggtgctttacggcctaaatggcgccgggaagacagcgctgttaaatatgctttgctcatattattttccaacatcaggcgagatgcaggtgcttggccatgaatttggcaaaacagagcttggggaaaagctcagacgtaaaattggcctcgtctcagctgctcttcagcaaaaattgtacccggcagattcagcctttgaaattactttgagcggagcttacgcttcgattggtttatatgaaacgccaagtaaggaaaccagggaaaaagcgattggtttgttagaggacttgggagcaattgaatatgccgatcgccgctatgaaaccctttctcaaggggaaaaacaaagagcgttgattgctagagcactaatggccgatccggagttgctgatactggatgaaccagtcacagggctggattttattgcccgggaaaagctgttagatacgattacatacattgcaaacaaagaaaatgcaccatctatcctttatgtgactcatcatgctgaagaaattttgcctgtctttgataaagcccttttattaaaacagggagaggtctttggatccggagaaataaaggaaatgcttactgatcaaatactttccgctttttttgataccccaatccatgtattatggaatcaggatcggccgtttttaacaagagctgagccgataacgaatgcctgacaaacatatatagattcatcctaggggtgctttgcgaagctgagagagactttgtctcaacccttttgacctgatctggatcatgccagcggagggaagcggtgaaaagcggagtacatcggactccgtttgtttttattaagccgtttcatcacatttgaaacggcttttttgattttaaagaataggagcggatttacattggatcaacaaatagactctttgcaaaaaaaagtggaagaacataaggaggagcttattcagcttgcgaaaacgctgatttcttatcaaacacctgctccgcctgcaagaaatacagagggcattcagtcatggattgcgggatatttaaatgaattgggattctcgatcgacaaatgggatgtgtaccctggagatcccaatgttgtagggaagctaaaaggaacagattcagcagattattatagcctgattatcaatggccatgtagatgtggcagaggtaaaagaggatgaagaatgggagcatgatccatttcatccaattgaaaaaaacggtctcttaatcggtcgaggcgcttccgatatgaagggcggaatggcgtgtgtgttgtttgctgtcaaattaattcgtgaagccggcattgagcttccaggtgatctgattctgcaatcggttattggggaggaagttggagaggccggcacacttgaatgctgcaagaggggctaccacgctgattttgcaattgtcgcggatacgagcgatatgcatattcaaggccaaggcggtgtcattacaggctggatcgaaatcaaaagcagtcaaacatttcatgatggaacgagacggaatatgattcacgcaggcggaggaacattcggagcaagcgcaattgaaaaaatggcgaaaatcattgcggggctcggtgaacttgagcgccactggtccattatgaaaagttatcccggttttaaaccaggcacaaatacgattaatccggcagttatagaaggcggcagacatgcggcttttatagcggacgaatgccggctgtggatcacagtccatttttatccaaatgaaacccatgaccaagtggcagcggaaatagaagattacgtcaatcggctgagtgacagtgatatttggcttagggaaaaccgccctgtattcaagtggggaggctcatctatgatagaagacagaggagaaatttttccggcattggaagttgactctggccacccaggcgtcttagcgctaactgcctctcatcagaaagtgaaacgggagtgtccaattattgacgtttctcaatcagttacagatggcggatggctgtatgatgccggtattccatgcgtaatatacggtcctggagatctgcacaatgcacactctgtgaacgagaaggtatcgattgagcagctagtagagtatacaaaaattatactcgattttatcatcagctggtgcagccggaaaaaagaacaatgacatgaaaatttcttcttgctgacaaggttcagcctgcccgttcatatacttgaacaaaaggacggaaaaaggacgtgatggaatgatcagcatttcagaatttcaggtaaaggatgtcgtcaatgtctcaaacggaaaaaagctggggagtattggtgatattgatatcaatgtgaccactggaaaaattcaggcgatcatactcggaggaaatgggaaagttctcggattttttggaaaagaagaggaattggtcattccatggcgaaatatagtaaaaatcggggaagatgtaatcttagtccgattaagtgaaccacatgcataaacctgcttgtctgccgcagattggcaaatgccggaagtctcgattcttccggcacatttcatttagaaatatgcaaatcggcgctcaacgaatgcagtaagatgtggtaaaataagtgggaaattccgcttttttaaatgtttgtcgaaaggttggatcatcatgaatacatatcacccattcagtcttaccacaccctcgacactcatgatacaagactgggttcaaacgaatcaaaacaacaaaaaagtcattgccggatttacgacaaaaaacggcggtgtcagccaaaagccttttgaatcgttaaatacaggattgcacgttcatgacaaagatgcagatgtagttaaaaatcgtgaatatattgccgatatgtttaatactgatttgcagtcttgggtattcgctgatcagacacatgataatcgcgttcagaaagtgacgcagagggataggggaaaaggcgcccgtgagtatcacacggctctaaaagcaacggacgggctatatacaaatgaaaaaaatgtatttttagcattatgctttgctgattgtgtgcctcttttcttttatgatccggttaagtcgcttgtcggagtcgcccatgccgggtggaaaggcaccgtcaaacagattggcagagaaatggtgaagcaatggactgagaaggaaggttcaaatccctcagatatttacgctgttattggcccgtctatcagcggagcatgctatacggtagacgaccgcgtcatggatgctgtccgcgcattgccggtttcagcagaccttgccgttaatcagacggcaaaggcacaatatcagcttgatctgaaagagctgaaccgtcttatactgatggacagcggtttggcaagtgaacaaatttctgtcagcggtttatgcacggaaagcgagccgtctcttttctattctcaccgccgcgatcaggggaaaactggacggatgatgtcctttatcggaatgaaggaggcataaaagatcttgcgtgttgttgataatttacgacatataaacgaacgaataaacgaagcatgtaacagatcgggccgcagctccgacgaagttacggttattgcagtcacaaaatatgtatcacctgaaagagcacaggaggcagtagatgctggcatcacctgcctcggagagaatcgggatgcggaactgctccgcaaacaggaattgatgaaagggaatccggaatggcattttatcggcagtctgcaatcaagaaaagcaaaatctgtcgtcaatgcggtttcctatatccattccctagaccggctctcattagcgaaagaaattgaaaaacgggctgaaggtactgtacgatgctttgtgcaggtcaatacctctcttgagccttctaaacatggcatgaaaaaagaagaagtcattccattcatacaggagctttccggtttcgaacatatccttgttgccggactgatgacaatggctccgctgactgatgatcaagatcagatcagaagctgtttcaggtcgctgagagaactccgtgaccaggttcagaagctgaaccagccgaacgctccgtgtactgaactgtcgatgggcatgtcaaatgattttgaaattgcaattgaagaaggagctacttatattagaatcggctcatcgttagtcggaaatgaaacagggggtgtacagcaatgagtatgaaaaataaactgaaaaactttttctcaatggaagatgaagaatacgaatatgaatatattgagacagagcgggaatctcatgaggagcatgagcaaaaagaaaagccggcttatacggggaataaaccttcgggcaaacagaatgtagtgagcttgcaaagtgttcagaaatcctctaaagtggtgttgagtgagccgcgcgtttatgcggaggcgcaggaaatagccgaccatttgaagaaccggcgggcagttgtcgtcaatcttcagcggatacagcatgaccaggcgaagcggattgttgactttttaagcggaaccgtttatgccattggcggcgatattcaaagaatcggctcagatattttcctctgcacgcctgacaacgtagatgtatcaggcacaatttctgagctcatatctgaagacgaacatcagaggtggtaaagcgagatgatcctttatcaagttttttcggttttaagcttattaatcacaatatactcatttgccctgatcatatatatttttatgtcatgggtgccgagtacgagggaaacagcagtcggacgttttttagcttcgatttgtgaaccatatctcgaaccattcagaaaaatcatccctccgattgcaatgctggatatttcaccaatcgtagcaatacttgtgcttcggtttgcgacaaccggcttgtggggactttatcgcatgattgcgttttaatgtgacagtttgataggggcttggcagcagccaagcctctttacatagaagggaaagacgatgagcgatatatatcagcacttcagaaaagacgagcgggcctttattgatcaggcgctcgaatggaaaagaattgtccaggagcagtaccggatgaagctgaccgactttttagatccccgagagcaggtcatcctctctgctgttacgggacaggctgatgtcgggcttgctttttccggcggctatgacagagcggagcgaaaacgggcgattctgtatccagagtacattactccggaagaatcggattttgaattgcaggcgtttaacgtccgttatgctgacaagtttgtctcagtagatcatcgttctctgcttggtgcattaatgggcataggattaaagcggcaaaaattcggtgacatcgtgttttctgagacagcagtgcaattgattgtctcagccgataccgctgattttgtggctgcacagctgacccaagcaggcaaagcggcggtcagcctagagaaaattgacttgtcagaccttaacattccagcagttgatgtcgaaataagagatgacacggtttcttctttaaggcttgacgccgtctgcgcctctatgagcaggcaatcccgccagaaatcacagacgcttgtgaaaaacggccttgtgaaagtgaactggaaggtggttgaagatccttcatacatagtcgcggaaggggacatgctgtcaatcagaggttttggccggtgcagcttaacaaaaatcgaaggaaaaaccaaaaaagacaaatggagagttacgtttgaacgacaaaaatagtcggtttttcagtttttttctccatctgtgcgaaatttgttttataatgtgaactagataaccgtactgaaatgtaaaaaatggaggtggcatcatgccattaacgccaaatgatattcacaacaagacgtttacaaaaagttttcgcggatatgatgaagatgaagtaaatgaattcctagcccaagtcagaaaagattacgaaattgttctccgcaagaaaactgagcttgaagcgaaagtcaatgagctagatgaaagaatcggacactttgccaatattgaggaaacattgaataaatcaattttagttgctcaagaagcggctgaagacgtaaaacgcaattctcaaaaagaggcaaagctgattgttcgggaagcggagaaaaacgctgatcgcattatcaacgaatcgttatcaaaatcaagaaaaattgcaatggaaattgaagagctgaaaaaacagtctaaagtgttcagaacacgtttccaaatgctgattgaagctcagcttgatcttctgaaaaatgacgattgggatcatctccttgagtatgaagtcgacgctgtatttgaggaaaaggaataaattctctgattatcttgacattttcttagcttgtcgaatataatacgttcataaattcagatgaaaaaacggttgaaagggacagtcatgtttccttcaggccttcatagcgacccggagatggtgagagtccgggatggccggaatcatgtagatcagccctttagtttccttgctgaactcacagtaggttaggacgttcatcacgttacgatgctcaagaggaaaaagtgtatgctggctttttctaaaagggtggtaccgcgagataagctttctcgtcccttatgggatgagagggctttttttattttctgaaaaaatgcagtggaggaatgaaaatggattttaaagacacgctcttaatgccgaaaacagatttcccgatgcgtggaaatttgccaaaccgtgagcctgacattcaaaaaaaatgggaggaagaggatatctaccgtcttgttcaggaacggacgaaagaccgcccgaaatttgttttacatgacggacctccgtatgcaaacggcgacatccatatgggccatgcacttaacaagattttgaaagacttcattgtccgctataaatcaatgagcggctacaacgcaccgtatgtgccgggctgggatacacacggattgccaattgaaacagctctgacaaaaaacaaaaaggtcaaccgcaaagaaatgtcagtagcggaattccgcaaactatgcgaagagtacgcttggaagcaaatcgagggacagcgtgagcaattcaaacgtcttggtgtccgcggtgactgggaaaacccatacgtgacattaaaaccggaatacgaagcgcagcaaatccgcgtatttggtgaaatggcaaaacgaggctacatttacaaaggccttaaaccggttaactggtcaccttcaagtgagtctgctctggctgaagccgagatcgaatatcaagacaaacgttcagcatctatttacgtcgcttttggtgtaaaagacggaaaaggcgttcttgaaaacggcgagcgcatcattatttggacaacaacgccttggacaattccggcgaacctcggaatttcagtgcaccctgatcttgagtacagcgtgattgcagtaggtggtgaccgctttgtcgtagcaagtgcattagtcgaaaatgttgcatcggcatgcggatttgatcagtatgaagtgacaagaacggtcaaagggaaagaccttgagaacattatcgctgaacacccgctatatggcagagactctctcgttatgcttggtgaacacgtaacaactgatgccggaacaggctgtgttcatacagcgccaggacatggggaagatgactttatcatcggccaaaaatacggtttagatgtgctttgcccggttgatgaaaaaggtgtaatgacaagcgaagctcctggctttgaaggcatgttctatgatgatgcaaacaaagcgatcacacagcagctcgatgaaaaaggcgcacttgtgaagcttgaattcattactcactcttatccgcatgattggagaacaaaaaaaccaaccattttcagagcgacagcgcaatggtttgcgtctattaaagatttcagatcagacctgctggatgccattaaagaaaccaaatgggttcctgaatggggcgagcagcgtttgcacaacatggttcgggaccgcggagactggtgtatttcgagacagcgtgcgtggggtgtgccgattccggtattttacgctgaaaacggagaaccgattattacagatgaaaccattgaacatgtttctgaattgttcagacagcacggatcaaacatttggtttgaaaaagaagcaaaggatcttcttccggaaggctttacgcatcctggcagcccgaacggcacatttacaaaagaacaggatatcatggatgtttggtttgattcaggctcttcacatcaagcagtgcttgaagaacgtgatgacctcgttcgcccggctgatttatacctagagggatctgaccaatatcgcggctggtttaactcttctctttctacagcagtagccgtaacagggaaagcgccgtataaaggtgtgctaagccatgggttcgcactggatggagaaggacgcaagatgagtaaatcaatcggtaacgttgttgttccggctaaagtcatgaaacagcttggtgccgacatcttaagattatgggtatcttcagtggattatcaggcggacgttcgcgtgtctgacgccattctaaagcaggttgcggaagtatatcgtaaaatccgcaacacgttccgtttccttcacggcaaccttttcgattttgatccaaaaacaaatgcggtggctgtcgaagatcttcgtgaagtggatcagtatatgctgattaagctgaacaagctgattgataaagtgaaaaaagcgtatgatgagtacgaatttgcggttgtgtatcacagcattcataatttctgcacaatcgaattgagctcattctaccttgattttgcaaaagatattgtctacatcgagcatgcggatcatccggatagacgcagcatgcagacagtattctatgaaacgcttcttgctttagtgaagctttcagcgcctatccttccacatacggcagacgaattgtggtctcatttaacatttgttgaagagcagagcgttcagctgacagatatgccggaaacaatcgcggttccaaacagtgaagtgactgaagaaaaatttgaccgttttatggctcttcgtgatgacgtgctaaaagcattagaaactgcgcgaaatgaaaaaattatcggtaaatctttggaagcaaacctgaaattgtatccaaacaaagaaaacaaagagctcttggcttccataaaagaaaacctttctcagctgtttattgtgtctgaactgacaatcagcgaagaaaatgatgcgccgaacgatgcgcaaagctttgcgacgggtaaaatcgctgtcgagaaagcggaaggcgaaatgtgtgagagatctcgtgtgatttcaaaagatgtaggggcaaatccgaaatatcctacactttcattacgcaacgctgaaatcgttgaaaaatactatcaaaaataatgaaaagggcccggcgtaaaagccgggctttttttgtgccaagagtgacatcctttagaacggcaggaaaaatcttatgggctttagatcatcattcataggcaacaataaaggtactacgttaagagcaggagttgtgaagaatgaatgatcaactgaccgcaatttatacggaacttcttctgatgaaagaagaattacagtcgagattatttgagtattcttgctttcaggtttctacaagcccgcaagcagcaatcaatcataaacaaaaagcaactctgatctatcatattaaagaagagcttcaagacgttctccttgcattgtccaaaatcgaaaacggcacattcggatactgtgaagaaaccggggctcccattcctctttcaaagctggcagtgctgccgacggcccgaacagcaaacgattttctttattctgtccaatttgagaaaaaaacgcttccgatatggaaatcaacggatatcgaatatggtcaggcactgtatgaataacagtgtctggccggttattatgcctgatatttctttactccagtgctttttattgataaaatgcataatggattaaagtaaccgtaaactggaggaacgtttgtgctgtattatatgattgcactacttattattgcagccgatcaattgacaaaatggctagttgttaagaacatggaacttggccaaagcattccgatcattgatcaggtattctatatcacctcccatcgcaatacgggtgctgcatgggggatattagcgggtcagatgtggtttttctacctcataacaaccgctgttattattggtattgtttattacatacagcgttatacaaaaggacaaaggcttcttggcgttgctctcggacttatgcttggcggtgccatcggcaactttatcgatcgggctgtcagacaggaagttgtggattttatccatgttattattgtcaattacaattacccgatatttaacatcgcggactcttcattatgtgtcggcgtaatgcttttatttatacaaatgctgttggacagcgggaaaaagaaaaaggagcaatagcatgaatcaaattgatataaccgcttcagaagaacaaaaaagtgagcggattgataaatttttggcatcgactgagaatgattggtcaagaacccaggttcagcaatgggtaaaagacggacaggttgtcgtgaacggaagcgcggtgaaagcgaattataaaattcagccgggtgatcaggtgaccgtcactgtacccgaaccggaagcgctcgacgtcctggcagagcctatggatctggatatttattatgaggaccaggatgtgctggtcgtcaacaaacctcgcggaatggttgttcacccagcacccgggcatcttacgggcacacttgtaaacggccttatggctcattgcatagacctttccggaataaatggtgtgatgcgcccgggtattgttcacagaatcgataaggacacgtccggtttattaatggtggcgaaaaatgatatggcgcacgagtcacttgtaaaccaattggtcaacaaaacggtcacgcggaaatatacggcagttgtccacgggcttatttctcacgatgatggcacaattgacgcgccgatcggacgagataagaaagaccgtcaaagcatgactgtgacacgtgatggcaaaaacgctgtcactcattttcatgtactagagcgttttcaggattttacgttagtggaatgccagcttgaaacagggagaacccatcaaattcgtgttcatatgaaatatatcggcttcccattagcaggcgatccgaaatacggcccaagaaaaacaatcgactttaatggccaagcgcttcacgcgggagttttaggttttgaccatccacgaacaggagaatatgtcgaatttgaagcgccgcttcctgaggatatggcagaattaatcgaaaacctcagaaaaaacggttgacagagggtttcttttctgaaataataaacgaagctgaatagattctttaaaacagtccagagaggctgagaaggataacggatagacgggatgcgtgtataggcgcgcaccttgtcctaaaacccctctatgctctggcaggaggggttttttcttctatatgaactgtgaggtgtcacacattgaatcaaaaagctgtcattctcgacgaacaggcaatcagacgggcgctgaccaggattgctcacgaaatgatcgaacgcaataaaggaatgaataactgcattcttgtcggcattaagacaagagggatttatctggcaaaacgccttgcggaacgcattgaacagattgagggaaatcctgttacagtcggtgaaattgatattactctttacagagacgatctttctaaaaaaacgagcaacgatgaaccgcttgtaaaaggtgcagatattccggtagatatcacagatcaaaaagtcattctcgttgatgatgttctgtataccggaagaacagtcagagcaggaatggatgcgcttgttgatgtaggcagaccttcctccattcagcttgcagtgcttgtggacagaggacaccgggagctgccgatccgagcggattatatcgggaaaaacatcccgacatcaaagtctgaaaaggttatggttcagcttgatgaggtagaccaaaacgatctcgtcgccatttatgaaaacgaataatagatcacctttttaagggcaatccagagaggttgcaaagaggtgcacaacaaaggcccaaaaagcattcggcaggtctttgtatgcctctttgcgtaaaaaagcaaagaggtttttttatacagtcattgagtcatcctaaaatgaaagtcaacaatcagggggaaatcatcatgagtaagaaaaaagtaaatttaggggtcagggatgtcccgacacctttctcttgggtttcattcagccttcagcatttgtttgccatgtttggctcaaccatcttggttccgaagctcgtcggaatgagtcctgctgtggcgttggtgacaagcggcatcggaacactggcgtaccttcttattacgaaagggcaaattccggcgtatctcggttcatccttcgcctttatttctccgatcattctggtaaaagcgaccggcgggccgggagcggcaatggttggagcgtttcttgcagggctggtgtacgggctgattgccttattgatcaggcagcttggaacaggatggctgatgaagattctcccgcctgtagtcgtagggcctgttattatcgtcatcgggctgggactggcaagcactgcggtaaacatggcgatgtatgctgatccaaatgcgagtgagttggtctacagcttaaagcactttagtgtcgcaggagttacgctggcaatcacgattatttgtgcgattttcttacgaggatttttaagcctgattccggttctgatcggaatcatcggcggatacctgtttgcccttactcaagggattgtcaacttccagccggtgcttgacgcgaaatggttcgcagtgcctgaatttatcattccgttcaaagattattcaccatcagttacactcggcatcgcagccgcaatggttcctgtcgcatttgtcacaatgtcagagcatatcggccaccaaatggtgctgagcaaggttgtcggacaagacttcattaaaaagccaggtcttcatcgctctattatgggtgacagtgtggcgacaatcctcgcttccctgatcggcggtccgccgacaacgacttacggagaaaacattggcgtgctggccatcacaagagtattcagcgtctttgtcatcggaggagcggcagtgattgcctgttgcttcggctttatcggcaaaatttcagcgctgatcagttcagtgccgtcagcggtcatgggaggcgtctccttcctgctgtttggaatcattgcttcaagcggtctgagaatgctgattgacaacaaaattgattatgaaaacaacagaaacctcattattacatcagttatccttgtcatcggtgtaggaggcgcttttatccaagtgtctcaaggcggattccaagtgtcaggaatggcgcttgccgcaattgtcggtgtcatcttaaacctgattcttccgcaggcgaaggaagagcagaaagacacatctgaacaacatcatatctaaaaccttttaatgaaagtccagagaggcttggaagggttatgaagagaagggagcttcaatgctgccctctatttaaccataccccgagtctatcttagaccggggtttttttcagccttaagttgaaaagagaggggaaagaacatgaagcatttaacgacgatgagtgaactcggcactgaggaaatcaaagatttgcttcaaacagcacaagaccttaaaagcggaaaaacagacaatcagcttacaggaaagtttgccgcaaacctgtttttcgaaccgagcacgagaacgcggttcagctttgaggtcgcagaaaaaaagctgggcatgaatgtgctcaaccttgatggaacaagcacaagcgtgcaaaaaggcgaaaccttatatgacacgatccggacgctcgaatcaatcggtgtggacgtctgcgtcatcaggcacagtgaggatgagtattatgaagagcttgtcagccaggtgaacattccgattctgaatgcgggagacggatgcggccagcatccgacacaatcactgcttgatttaatgacgatttatgaagagttcaatacgttcaaagggcttaccgtctccattcacggcgacatcaagcatagcagagtggcaaggtcaaatgcggaagtgttgacaagattgggtgcccgggtcctattttccggcccttcggaatggcaggatgaagaaaatacattcggtacgtatgtctcaatggatgaagcagttgagtcttccgatgttgtcatgctgctgcgcattcaaaatgaacgacatcagtccgctgtcagccaggaaggctatttaaacaaatacggcttgaccgtagaacgggctgagcgtatgaagcggcatgcgatcatcatgcatcctgctccggtaaacagaggagtggagattgatgacagcttagtagaaagcgaaaaatcaagaatcttcaagcaaatgcaaaatggcgtatttatcagaatggcagtgatacagcgtgccttacaaaccaatgtgaaaagaggagaagcagcgtatgtcatatctcattaaaaacggctggatactaaacgaaaatggtgaaaaaacagaagcggatatccgagtgactggagaaaccatcaccgcaatcggcaagcttgatgcaacggataatgaaacggtaattgatgcgaaaggtttgctcgtttcacctgggtttgttgatctccacgtgcatttcagagagccgggcggagagaaaaaagaaactattgaaaccggggccaaagcggcggcacgcggcggctatactacagtagcagcaatgccgaatacgcggccggttcctgatacaaaggagcagatggaatgggtgcaaaacagaattaaagaaacatcatgcgtcagagttcttccatatgcatccattacgatcaggcaaatcggcgatgaaatgacaaactttgaagcattaaaagaagccggggcatttgcttttacagatgacggtgttggtatacagacagcaggtatgatgtatgaagcgatgaaacgggcagctgcaattgacaaagcgattgttgcacattgcgaggacaactccttaatttacggaggaagcgtacatgaggggtcattctccaaagcgaacgggctaaacggcattccttctgtgtgtgaatcggttcatattgcccgcgatgtgctgctggctgaggcggcaaactgccattatcatgtatgccatatcagcacgaaagaatctgtcagagttgtacgcgatgcgaaaaaagcgggaatcagagtgacagcagaagtgtcgccgcatcatttgctgctttgtgatgaggatatcccggggctggacacaaactataaaatgaatccgccgctccgcagtgcagaagacagagctgctttaattgaaggtcttttagacggaacaattgattttatcgcaacagaccatgcaccgcatacggaagaagaaaaaaacacagaaatgaaactggcgccattcggaattgtcggcttagaaacagcattcccgcttctttacacacactttgtcaaaaatggcagctggtcgctgaagcagttgattgactacatgacaatcaagccatgcgaagcgttcggtctcccatatggaacattacaaacggggcaagctgcggacattacgttaatcgatttagaaaaagaagcagttatagacaaagacacgtttttatcaaaaggaaaaaatacaccattcaacggcatcagctgcaccggctggccggtcgctacaattgcggcagggaagcttgcttatgaagaggggagacttgtcaaatgaagagacgattagtactggaaaacggagcggtattcgagggagaagccttcggaagcttagaacacaacatgggagaagtcgtttttaatactgggatgacaggctatcaggaaattttatctgacccttcttactgcggacagatcgtaacattaacatacccgcttatcggaaattacggcattaaccgtgatgattttgaatccattaccccttttgtaaaagggctgatcatcaaagaattatgtgagctgccttccaactggcgttcagcatacaccttagacgagtatttaaaaatgaaaaacattcccggactccaggggattgatacaaggaagctgacaagaatgatccgcacggcaggcgcgctaaaaggaacattcgcttcatctgatgaagatatcgaagcagtgctgaaaagactgaacgaaacggaattgccaagaaatcaagtatcccaagtatcagcaaaaacagcatatccgagcccgggaagaggcaaacgcatcgtcttggttgacttcggcatgaaacacgggattctaagagagctgaacaaacggaaatgtgacgtcatcgttgtgccttacaacattacagcggaagaggtgcttcagctgaaaccggacggtatcatgctttctaacggacctggagacccgaaggatgtgcctgaagcgattgaaatgattaaaggtgttcttggaaaagtgccattattcggaatatgtcttggccaccaattattcgcgctggcgtgcggggcgaatactgaaaaaatgaaattcggccacaggggctcaaaccacccggtaaaagagctggctacaggaaaagttgccttaacatctcaaaaccatggatatacagtttcgtctatcagtaaaacagaactggaagtgacgcatatcgcaattaacgacgatacgattgaagggctgaagcataaaacattgccggcatttacggttcaatatcatcccgaagcctcacctggtcctgaggatgccaaccatctatttgacagattcatcgaaatgatcgaaacaacagagaaagaaggggaagcggtatgccaaaacgcgtagacattaacaaaattttagtaatcggatctggaccgatcatcatcggccaagcagcagaatttgactatgcgggaacacaagcctgtcttgctttgaaagaagaaggctatgaagtcatccttgtcaactcaaaccctgcaacgatcatgacagatacagaaatggctgaccgggtttacatcgaaccgctcacacctgaattcctgacacgaatcatcagaaaagagcgcccggatgccattcttcctacactcggaggccaaaccggtttgaatcttgcggttgagctttctgaaagaggcgttttggcagaatgcggcgtcgaagtgcttggcacgaaactgtctgcgattcagcaagctgaagaccgtgacttgttcagaacattaatgaatgaactgaatgaaccggtgcctgaaagtgagattatccactcccttgaagaagcagaaaaattcgtcagtcaaattggattccctgtcattgtccgcccggcatatacattaggcggaacaggcggaggtatctgctcgaatgaaacagagctaaaagaaatcgttgagaacggcttgaaattaagcccggtacaccaatgtcttcttgaaaaaagcatcgccggctataaagaaatcgagtatgaagtcatgagagacagccaggatcacgccattgtcgtttgtaacatggaaaacattgatccagttggaatccatactggagacagtattgttgtcgcgccgagccaaacgctcagcgatcgcgagtatcagctcttgcggaatgtatcgttaaaactgattcgcgcgcttgggatcgaaggcggatgtaacgtccagctcgccttagatccagacagcttccaatattacattattgaagtaaatccgcgtgtcagccgttcatctgctcttgcatcaaaagcaacgggatacccgatagcaaagctcgctgctaaaattgcagtcggactttcattagatgaaatgatgaacccggtgacaggaaaaacatatgcagcatttgaacctgctcttgactatgtcgtatccaaaattccgcgctggccgtttgataaatttgaatcagcaaacagaaagcttggcacgcaaatgaaagcgacaggtgaggtcatggcaatcggccgcacgcttgaagagtcattgctgaaggcagtgcgttcgctggaagcggatgtgtatcatcttgaattgaaggacgccgctgacatttcagatgagcttcttgaaaagcgaattaaaaaggccggtgatgaacgcttattctacttagctgaagcgtacagaagaggctacacggtagaagacctccatgaattttccgctatcgatgtcttcttcttgcataagctgttcggaatcgtacagtttgaaaaagaattgaaggccaatgcgggcaatacggatgtgctgagacgggcaaaagaactcggcttctctgatcagtacattagccgcgagtggaaaatgaaagaatctgagctttacagcttgagaaaacaagcggggattgcgccggtattcaaaatggtagatacgtgcgcggcggaattcgagtcagaaacgccatacttctatagcacatacgaagaagaaaatgaatctgtcgttacagataagaaaagtgtgatggtgcttggttcgggtccgattcgaatcggtcagggtgtcgagttcgactatgcgacggttcactctgtatgggcaattaaacaagcaggctatgaagccattattgtcaacaacaacccggaaaccgtttcaacagacttcagcatctcagacaagctgtattttgaaccgcttacgattgaagatgttatgcacatcattgaccttgaacagccaatgggcgttgtcgtacagttcggcggacaaactgcgattaaccttgctgacgagctttctgcacgcggagtgaaaatccttggaacttcattagaagatttagaccgtgcagaagaccgggataaatttgaacaagcgcttggagaacttggtgttcctcagccgcttggcaaaacagcgacatcagttgatcaggcggtaagcatcgcgagtgatatcggttatccggtactggtgcgcccttcctatgtacttggcggccgggcgatggagattgtttaccatgaagaggaactgcttcattacatgaaaaatgcagtcaaaatcaatccgcagcaccctgtattaattgatagatacttgaccggaaaagaaattgaagtcgatgcagtatccgacggtgaaacagtcgtcattccgggaattatggagcacattgaacgtgcgggcgttcactccggagactcgatcgctgtttatccgcctcagtctctcacagaggacattaagaaaaaaattgaacaatacacgatcgcattggctaaagggctgaatattgtcggtttgctcaatattcaattcgtcttgtcgcaaggcgaggtgtacgtgctagaagtgaatccgagatcaagcagaaccgtaccgtttttaagcaaaattacgggtatcccaatggcgaatctcgcaacaaaaatcattcttggtcaaaagctggctgcgtttggctatacagagggccttcagcctgaacagcaaggtgtatttgtaaaagcgccggtcttctcctttgccaagctgagaagagtggacattacgttagggcctgaaatgaaatcaacaggtgaagtcatggggaaagattcgacacttgaaaaggcgctctacaaagccttgattgcttcaggtattcaaatcccgaactacggttccgtgcttttaaccgtagctgataaggacaaagaagaagggcttgccattgctaagcggttccacgcgatcggctacaacattttagcgacggaaggaacggcaggctacctgaaagaagcttccattccagcgaaggtcgtcggaaaaatcggtcaggatggcccgaacttgcttgacgtcatcagaaacggagaagcgcagtttgtcatcaatacgctgacaaaaggaaagcagccggcaagagacggttttagaatcagacgtgaatcagtagaaaatggtgttgcctgcctaacatctttagatacggcagaggcgatattgcgagtgctggaaagcatgacattccgtgctgatcaaatgccggcagtcaacacaaatcaggaggcggcagtcactatatgaaaaaagcgtatttgacagtatgttctaaccagcaaattgcagaccgggtgtttcaaatggttctgaaaggggagcttgtccaagggtttacaacccctggacagttccttcatcttaaagtgagcgaagcggttacgcctcttttgagaaggccgatcagcatcgcagacgtcaactttgaaaaaaatgaagtcaccatcatttatcgggtagatggtgaagggacaagactcttgtcactgaagcagcagggagaacttgtggatgtcctcgggcctttgggaaatggctttcctgttaatgaagttcaacccggaaagacggctttgctggtaggaggcggagtaggtgtgccgcctctccaagagctgtcgaaacgcttgattgaaaaaggggtaaatgtcatccacgttttaggattccaatcggcaaaggatgtattttacgaggaagaatgcaggcagtacggagacacgtatgtggcaacagctgacggaagctacggggaaaccggatttgtcacagatgtgattaaacggaaaaatctagagtttgatatcctcctcagctgcgggccgacaccgatgctcaaggcgttaaaacaggaatatgcccataaagaagtatatctgtccatggaggaacgaatgggctgcggaatcggcgcatgcttcgcgtgtgtgtgccatacaaacgaaagtgagacatcctatgtaaaagtatgtctcgacgggcctgtatttaaagctcaggaggtggcgctgtaatgctagaggtgaaattgccgggacttgatttgaaaaacccaatcattcctgcatcaggttgcttcggttttggaaaagaattttcacgtttttatgatttgtcttgtcttggagccatcatgattaaggctacgacaaaggagccgcgctttgggaatccgacgccgcgggtagctgagactggtgctggaatgctcaatgcgatcggtctccaaaatccggggctggatagtgtgttgcatcatgagctgccgtggcttgagcagtttgatacaccgatcattgccaatgtcgcaggttctcaagtcgatgattatgttgaagtcgcagaacatatcagcaaagcgcctaatgtccatgcacttgaattgaatatttcctgcccgaatgtgaaaacaggcggaatcgcttttggcacgaatcctgaaatggctgccgatttgacaaaagcggtgaaagaggtttcggatgtacccgtttatgtgaagctttccccgaacgtggctaatatcacagaaattgccttagcgatcgaggaagcgggagcggacggtcttacgatgatcaacacactaatcggcatgagactcgatttaaaaaccggcaaaccgatattagcgaataaaacagggggactttcaggccctgctgtgaagccggttgccattcgcatggtgtatgaagtcagccaggcggtcaacatcccgattatcggaatgggaggcgtgcaaacggctgaagatgccctggaatttcttctcgcgggagcaagcgcagtcgctgtcggaacagcaaactttgtgaatccttttgcatgtccagagattattgaacagctcccatctgttttgctccaatacggctatcaatcaattgaagaatgcatcggaaggagctggaatcatgaaaaacaacctgcccatcatcgcgcttgattttgcgtcagctgaagaaacacttgcgttcttagcgccttttcagcaagaaccgttatttgtaaaggttgggatggagctcttttatcaagaagggccatctatcgtgaaacaactaaaagaaagaaactgcgagctatttttagatctaaagcttcatgacatcccgactactgtaaacaaagcgatgaagcgccttgccagtcttggagtagacctcgtcaatgttcatgctgccgggggcaaaaaaatgatgcaggcagctctcgaaggcttagaagaaggtacgccggctgggaaaaaacgtccgtcacttatcgcggtaacccagctgacaagcacatctgaacaaatcatgaaagatgaactgctgatcgaaaagtctctgattgatacggttgtgcactacagcaaacaggcggaagaaagcggactggatggagtggtctgctctgttcatgaagcaaaagccatttaccaagcggtgtcgcctttatttctgactgtcactccggggatcagaatgtcagaggacgctgcgaatgaccaagtccgcgtagcgacgcctgccattgcaagagagaaaggttcatcagcgattgtagtaggacgctcgattacaaaagcggaagacccggtaaaagcctataaggctgtcagacttgaatgggagggaatcaaatcttgaaacaaatcatcgcaaaacatctattagacatccaagctgtatttttacgcccgaacgagccgttcacatgggcaagcggcattttatcaccgatctactgtgacaaccgccttacgctatctttcccagaggtcagaaacgatgttgcttcaggtatcagcaagcttgtcaaagatcattttcctgaagctgaaatgattgcgggaacagcaactgccggtattcctcatgctgctcttgcggctgaccgtttgaatcttccgatgtgttatgtgaggagcaagccgaaggcgcacggaaaaggcaatcagattgagggagctgtgcaagaggggcaaaaaacagttgtcattgaagacttaatttccacaggaggcagcgtgcttgaagcttgtgcagctttacaagcggccggctgtgaagtgcttggtgtcgtctcaatctttacgtacggacttcccaaagcggaggaagccttcgcaaaggcagaactgctatactactcattaactgattatgatacgctcacagaggtcgcgcttgaaaacggaaatattcattcagatgatctaaaaaagctgcaaacatggaaacgaaatcccgagtcaaaagattggtttaaaaaataaaaaataaattcaaatgatgtaaagaggcttcaaagccttgctgtacttgaaaacaggctgtgaggcctgtttttttattaatcctataaaaaaagtcgggttgacttatgttagaattgtgctaaaatttactacaaatctaaaaacttatcaagagcggctgagggactggacctatgaagcccggcaacctgcatagtttgtaaggtgctacttccagcaaaatgaattccattttgaaagataagggctgcatgctgttcctgtctttctttccgccggattgaaagttttttattttaagaggaaaaaaggctgtctgtgatatcagcagccgcgaatcacattacaattgggaaaagacaaccggcagaaagctactgtttgtttgtctccgaaaggaggaaagaagaaatgttaacgtacgataattgggaagaaccaacgattacatttccggaagacgatccttataaaggagcgctgtcagttttaaaatgggcatacggccattacggcaatcagcttgtttatgcctgcagtttcggaattgagggaatcgttctgattgacttaatttataaagtgaaaaaagacgcagagattgtgtttcttgatacaggacttcattttaaagaaacctatgaaacaattgaacgagtgaaagagcgttatccgggtcttaatatcatcctgaaaaaaccagacctcacccttgaggaacaagccgaagaacatggtgacaaactgtgggaaagagagccgaatcagtgctgctatcttagaaaggtcgttcctttaagagaggcgctttcaggacatccagcctggctttccggcctgcgccgtgatcaagggccaagccgtgccaatacgaatttcttaaacaaagatgaaaaattcaagtcagtaaaagtttgcccgcttatccattggacttggaaagacatttggagatacacatcccggaatgaactggactacaatccgcttcatgaccaaggatatccaagtattggctgtgcgccttgcactgctcccgcttttactgcagaggatttgcgctcaggcagatggaatggtatggcgaaaacagaatgcggactgcatgaataaggagctgcaaaatggaattagccgctattttatttagcttgtttttcgcgatgaatattggtgcaagcggcgctgcagcttcgatgggggttgcttacggctccggagccatcaaaaagaaaacctacgctttgatcctatgcgcagtcggtgtctttgccggggcggtcattggcggaggcgaggttgtaaaaacaatcagctccggcattattcctgagcagacgattacactgacgattgtttgcatcattattggagctgctgccctgtcgctctttactgctaatctgctcggcattcctttgtcgacaagtgaagtaacagtcggcgcggttgtcggcgtgggagtggcttataaagtattgtttgtgaacaatcttctgatcattgtgtcattttgggtttttgtcccgctgttcgctttcggcttcacctatttcgtatctaagctgtttcgttattttaagattgaagtaaaatcttctaaaaaacaaaaaatcctcggcattgttttgttagttgccggatttttcgaagcattctctgccggcatgaataacgtggcgaatgctgttggcccgttagtagctgccgatgtgcttgatgtcggaaaaggaaccttgtatggaggagcttttgttgctcttggcgcactgttattaggccggcgtgtgctagaaacaaacgggaagaaaattacgagattctccaaaggggaaggcattctcttatccggtacaggagcaggacttgtgatcatcagttctgtatttgggatgccggtgcccttggcgcaagtcacgtcatcgtctattatcggaataggcatggcaaaaaacggtccgaacgtgttccataaacaagttgttcaaacgatgctgaaggtatggatcgtatcgccgtttttatctttatcgatttcttatctgcttgtatccttgtttttaaaagcagattattattcgatctttatcatggtaagtgtgcttttagcggcgggcggtgccatcagcctgacaaaggccattcgtaaagagagacgctcagtccacgaacaaggcgggggaatctgatcattaatctgagtaattttataagttaactaggaggagatggatattatgagcttagcaccacacggaggaacattagtaaacagagtagatgaatcatatgatgtgagcggcattcaaaaagaaattgaacttgatttaatttctttcgcggatttggaattgatcggtatcggtgcatacagcccgattgaaggtttctttaatgaaaaagattacgtatctgttgtcgaaaacatgcgtctttcttccggtgttgtttggtctcttccaatcacgcttccggtcgatgcgcaaaaagcagcggaactgtcacttggtgaaacggtaaagttaacgtatgaaggagaaacatacggcgttatccaaatcgaagacctgtatgtgcctgacaaacaaaaagaagctgtcaatgtgtacaaaacagatgaacaggagcatcctggtgttaaaaagctgttcagccgcggcaatacatatgtcggcgggccgattacgttgattaaaaaagcttcaaaacagttccctgaatttacatttgaaccgttagaaacgagacgccagtttgcggaaaaaggctgggaaaccattgtcggtttccaaacaagaaaccctgttcacagagcgcatgaatacattcaaaaaacggctcttgaaacagtagacggcttgttcttgaatccgttagtaggtgaaacaaaatctgatgacattccagctgatgtacggatggaaagctaccaagtgcttcttgatcattattacccgaaagatcgcgttttccttggtgtctttttagcggcgatgcgttatgcaggcccgagggaagcaattttccacgcgcttgtcagaaagaactacggctgcacacatttcatcgtcggccgtgatcatgcaggtgtaggtgactattacggaacatacgaagcacaggagctgtttgacacatttaaacctgaagaactcgggattacgccgctgaaatttgagcacagcttcttctgtaaaaaatgcggaaatatgggaacagcgaaaacatgccctcatggcagagagcatcacgtcattttatcaggcactaaggtaagaggtatgctgagagacggtgtgctgccgcctgctgaattcagtcgaaaagaagtcgtagaagtgttaatcaaagggatgaagaaaaaagaagaagtaggcgtatcttaaggaggactggcagtgacaaatcgcgatattgtatggcatgaagcctctatcacaaaagaagagtaccagcaaaaaaacaagcataaaagctccattctctggctgacagggttaagcggctcaggcaaatcaactattgccaacgccgctgcgagagaattgtttgagcaaggctaccaagtgattgtgctggacggggataatatccgtcacggcttaaataaggatcttggtttttctgatgaagaccgaaaagaaaacatccgccgaatcggagaggtggcaaagctttttgttcagcagggaaccattgtgattactgcttttatctctcctttccgcgaggacagacaacaggttcgcgagcttgtggaagcgggcgaatttaatgaagtctacattaaatgcgaccttgatatttgtgaacaaagagatccgaaagggctttacaaaaaagcaagaaacggcgagattccgttttttacaggaattgattctccttatgaagaaccggaagctccagagctcgttcttgattcaggacaacatgaccgtgaagcgtgtaaaaatcagctgatcgagtttgttaaacaaaaattgagctgaatatgatctgctgcgttcttctcagatgccggaatgcaagcgagaacatcatcacagcgaatgctctggaagaactcgaatagatcgggggaaatacgatggggaaagtatatattgtaggagcgggtcctggtgaccctgatctgttgacaattaaagcgctgaaagccattgaaaaagctgatgtcatcttatatgacagattagtaaataaagagattttacaatatgccaaagagcaagcagacctgatctactgcgggaagcttccagattttcatacgatgaagcaggaaaccatcaatcgatttcttgtgaagtatgcgcaaaaagggaaaatggttgtcagactgaaaggcggagacccttttgtgttcggcagaggaggggaagaagcggaatgcctctctgaaaatggaattccgtttgaaatcatccccggcattacgtctggaatcgcggcagccgcttatgccgggattcctgttactcatcgggaggcgggctctaacgtcgcttttgtaacgggtcattataaaaaagaagaagattttgaggaaaagtggaaagcgctggctacaggaattgatacacttgtcatctatatgggtatcaaaaacgtgcagcagattgaaagaaaactccttgaaaacggccgggacggttctacgccggcagcctttattcattggggaacaacggacaagcaaaagtctgttttttgtacagttgacaccctttcagaaacggtgataaaagaaaacattacaaatccgagtttaattgtcattggaaatgttgtaaattatcactataagctggaatggtttgaatctgaactgaaaaaacaagatttaagcgaggcgttgtaaaaatgaaacaagcaattttatatgtcggccacggcagccgggtcaaaaaagcgcagcaagaagccacagcctttttggaaggatgcaaggcccacatctctgtgccagtacaagaaatcagctttttagagcttcaggagccggcaattgagacaggatttgaagcatgtgtgaagcaaggcgccactcatatcgcagtggtgcctctgcttcttttaacagctgcgcatgcaaaacatgatattccggaagaaattgcccgtgctgcatctcgatatccgtcagtccgcatttcatacggaaagccgatcgggattgacgaagaagtagtcaaggctgtatatcaccgaatgaaagacataggtgttccatatgaaaatgccagagtggtactcatcggaaggggaagttcagatccagatgtcaaaagagacgtaaccggtattgctaatcttcttcaggaaatggttccagtcaaggaagtcattccgtgctttttgacagcatgcggcccgaattacaaagaggttttttcagaacttaaaaaagatgacggcataacaacctttatcgttccatatttgctctttacgggtatgctgatgaatgaaatcgaacgagaggttcagaaattaaaagctcataatccgaacgtctacctctcttcctatatcggttttcatcctcatgtgaaaaacgcatttttgaaccgtgtgagagaaactgcggcaaattctgagggacaatttgattttgatggagattcatatgcttccgctgcacattagcctggaaaagaagaaggttgtgattgcggggggcggcagcatcgctctcagaaggctgaaatcggtgatttctgagggagctgatataacgctcgtcagtccggatgttgaaccggaaatcaagcaaatggcagaagagcgacgtatcaaatgggaaaaacggacaattgaaaaagaagattatctcaatgctttcttcattattgctgcgacggataatgcggcagtgaacaaagaaattgcccaatccgcttcgccttttcagcttgtcaattgtgtcagtgacgctgagcttggcaatgtatatatgccgaaaattgtaaaaagagggcatgtcactgtgtctgtttctacaagcggagccagtccaaagcacacgaaagagcttgctgaaaacgtggataagctgattgacggcgattttattgctgaagtgaacaggctttatcaggtgagaaggaagaaataagccagagcatacaaatgctctggcttttctttatgcggctcagctttttttgagcttgatgacagtatcagcatcaggcgtgacaaagacggtatgctggctgtcataggtgacgaaaccgggtttcgcgccgtttggttttttgacatgcctgatttttgtataatctacaggcactgaacttgaatctttagcttttgaaaaataagctgcaattgtcgcggcttccatgattgtttgctcatccggttcgctgcttctgatcacaacgtgggagcctggaatgtcctttgtgtgaagccagatatcgtctctggccgccgctctggtcgttaaatattcattttgacgattgttcttacccactaaaatcgtcaggcctgaggtggattcatatgtttctaacaccggattgtgcggtttttgctttttctggcctttttgctgcttagggcgtaaatatttgccctcaacaagctcttccctgatttcgctgatatcccggggagaagcggacgaaagctgctgaaacagctgatcaaaatattcgatctcttcctgtgccagcctgatttgctcctcgacaactgcgaccgaatttttcgctttctgatacttcgtgaaataggcctgtgcgttttcagaaggcgttttgtttgggtttaaaggaatcgtgattgtcgggctttcttcattataataattgatgacctcagcctgtttatcaccttttttcaacatatataaattagcggttaaaagctccccgtaaagctgaaattccttcgcgttttccgaatactccagggttttctctaattttttgattttgttggcattcttcttccgttcgttcacaacaaaacgctcaagatcctgagcctgttgcttgacccggtctcgttcagcttttccgaaataaaaacggtcgagcagttcgcttaatgaatcaaaacggcgcgcttcgccctttagatgagtcagctccagcaggtaaaaatattcctttccgtttacagtcgtaatgttgggaatgaaacggtgctctttcacttcagcaaacagtgccagcaacgcttttggcagtgtgactttgttggcaaggcctgctctgtgaaccgcttctttggcgaaaagcggagacacgcctgaaaagtggtcgacaatttgtttatcaagccttccttcttgaaagctgaggtgacgcaaaatatcatcttctgacgcctcaagaggcgatattttgtcctgagcaggcggaagcttataatcttggccgggcagtactgtacggtagctgttcattgacggtgataagtgcttaagtccgtcgatgatcacattttctgctgcgtcagtcaaaatgatattgctgtggcggcccataatttctacataaagctttcgtacggtttcatcgccaatttcgtttcggcttttgatatgaaaaatcataatgcggtctaagcccgcttgttcaattttctcaatgaatccgccttcgatatgctttctcagcaacatgcaaaacattggcggttcgcttggattttcataagcttgtgccgtgatatgcacccgtgaatagctcggatgtgccgataataatagtttttggttttttccattggcacggatgtggaaaatcacatcgtgcttatatggctgatggacttttgtaattcgtccgcccattattttctcgttaagttcgtgtgtcattccgtatgtaaacatgccatcaaacgacatatgcaatacaccctctcattcttcctgcattcgataattatagcatgaaatgggacgagtcagaataagcatgcttatagagtgatatctctataagagagcaggggagtggacgagcggaatgaagtttcatgaaatgggacaaacagatttactagaggcaaccaatacgtccatgaaacaaggattaacagaaaaagaggtaaaaaaacgccttgacaagcatggaccaaacgagctgcaagaaggggaaaaaacttcagcgcttctcttgtttttcgcgcagttcaaagattttatggtgcttgtgcttctggcggcaacgttaatctcaggatttcttggtgaatatgtagatgcggttgcgattattgcgattgtgtttgtgaatggcatacttggtttctttcaagaaaggcgtgctgagcaatctcttcaggctttaaaagagctttcaacaccgcatgtcatggcactcagagaaggaagctggacaaagattccttctaaggaactggtgccgggtgatattgtgaaatttacgagcggggacagaattggcgcagacgttcgaattgttgaagcaagaagccttgaaatagaagaatcagcgctgaccggggaatcaatcccggttgtgaagcatgctgataaattgaaaaaaccggatgtttcacttggcgatattaccaatatggcatttatgggtacgattgtgacccgcggcagcggtgtgggggttgtcgtcgggacaggaatgaatacggctatggggaaaattgccgacatgcttgaatcggcagggacattgtcaaccccgctgcaaagaagactggagcagctcgggaagattttgattgttgttgcattgcttctgaccgtacttgtcgttgctgtcggtgttattcaggggcatgatctgtacagtatgtttttagcaggtgtctcgttagcggtagcagctattccggaggggctgccggcgattgtgacagtggcgctatcgcttggtgtacagcggatgattaaacaaaaatccattgttagaaagcttcctgctgttgaaacgcttgggtgtgcgtctatcatttgttcagataaaacagggacaatgacccaaaacaaaatgacggtgacacatgtctggtccggagggaaaacatggagagtggcaggggccggctatgaaccgaaaggaagcttcacactaaacgaaaaagagatcagtgtcaatgaacataagccgcttcagcagatgcttctgttcggagcgctttgtaacaactccaatatcgagaaaagagacggcgaatatgtgcttgacggagatccgacagagggagcgctgctcaccgcggcaagaaaaggcggtttttcaaaggagtttgttgaatcaaactaccgggtggtcgaagaatttccgtttgattctgcacggaaaatgatgactgtcatcgtagaggatcaagacagaaagcgctatatcattacaaaaggtgcaccggatgtactgatgcagcgatcttcccgtatttattatgacggctcagcggctcttttttcaaatgaaagaaaagcagaaacagaggcggtattaagacatttggcatcacaggcgctcagaacgatagcggtcgcctacaggccgataaaagcaggcgaaacaccgtcaatggagcaggcggaaaaagatctgaccatgcttggcctttcaggtatcattgaccccccgcggccggaagtcagacaggcgataaaagaatgccgtgaagcaggaattaagaccgttatgattacaggtgatcatgtagaaaccgctaaagcgatagcgaaagacttgcgcctccttccgaaaagcggcaaaatcatggacggcaagatgctgaatgaactttctgaagaagagctttctcatgtggtggaggatgtatatgtatttgcccgcgtttcccctgaacataaactaaaaattgtaaaagcctatcaggagaacgggcatattgtggcgatgacgggagacggcgtcaatgatgctcctgccattaaacaagctgatatcggcgtctctatgggcattaccgggacagatgtggccaaagaagcatcatctcttgttctcgtggatgataattttgcgacgattaaatcagcgataaaagaaggcaggaacatctacgaaaatatcaggaagtttatcagatacctgttggcgtctaacgtcggagaaattcttgtcatgctgtttgcgatgctgctggcccttcctttaccgctcgttccgattcagattttgtgggtcaacttggtgacggacggattgccggcgatggcgctcggcatggatcagccggaaggagacgtcatgaagcgcaagccccgtcatccgaaagaaggggtatttgcccgcaagctaggatggaaggtcgtttccagaggatttttaatcggagttgccactattttagcgtttatcattgtgtaccaccgcaatccggaaaacttggcttatgcccagacgatcgcgtttgccacattggtgctcgctcagcttattcacgtgtttgactgccgcagcgaaacttctgttttctctagaaatccgtttcaaaacctgtatttaatcggcgcggtattgtcatccattttgctgatgcttgtagtaatctactatccgccgcttcagccgattttccatactgtagccatcacgccgggggactggatgctcgtcatcggtatgtccgccatccctacttttttgctggcggggtcacttttaacaagaaaaaaataaattcatatgatataatcttaggggtaatagcgtgtctattgcccttttattatgagaacagggaagaattgggtgttttaaaatgatacgaagtatgacaggcttcggcagtgcaagcaaaacacaagacgatctctctgtaagcgttgaacttaaatctgtgaactacagatttaaagaagtgaacgctcgtttgccaaggcctttgctatattttgaagataagctgaaacagaccattctgcagcatattcagcgcggaagaattgagcttttcgtatccgttgacagcgatatgcttgttgagaaaaggcttgaaattgattggccgctgctcgatgagtttgtcgcagccgcgagaggtatgaagaaacggtatcaattgtctgcagagcccgatgtaatggatttctttaagcttgatcatgtcgtccaggttcatgaagaacagacgcaaaatgacaagctggaggcgttgatcatcgatgctgcagaagaagcggtaaaaggtctctgtgaaatgcgtgaaaaagaggggctgctcttagcgaaagactgcctgatgcatattgatcagcttgaagagctggtgagagaaactgaattgctggctgcagatgtcgtatctcgttaccgggaacggctgtacgccagaatcaaagaatggactgaagacgtattagacgagagccggcttgtaacagaatgcgctatttttgcagaccgctctgatatcactgaagagattacaaggctgaagagccacttcgcccagtttcgtgatatattagctagtggcggagctgtcgggcgcaaactcgactttcttgttcaggagctcaatcgggaagcaaatacgattggctcaaaagcaaatgatcatcagatcacaaagcttgtcgttgaaatgaaaagttctattgaaaaaataaaagaacaagtgcaaaatatagaatagtgactgtgcgtattgtttacagacggtcttactaggctaaactagagacgtctattttacagggggaacgtagaagatgacgattaaactgattaatatcggatttggcaatatcatctccgccaatcggatgatttcgattgtcagcccggagtctgcgccaatcaaacggatgattcaggatgcaagagaccgcggaatgctaattgacgctacatacggacgaagaacccgtgcagttgtcgtcatggatagtgatcacattatcttatctgccgtccagcctgagacagttgcacacagactttctgttaaagaagaaattatggatgaagggcaggggtaattgccgcatgaaagaaagagggttattaatcgttctctcaggtccctcaggagttggtaaaggaacggttcgacaagcgatcttttcgcaggaagacacaaaatttgaatattcgatttcagtaaccacaagaagtccaagagagggcgaagtgaacggagtcgattattttttcaaaacaagagacgaattcgagcaaatgattgcggacaacaagctgcttgaatgggcagagtatgtcggcaattattacggcacgccagtcgattatgttgaacagacgcttcaagatggaaaagacgtctttttagaaattgaagttcaaggggctcttcaagtgagaaatgctttcccggaaggcctatttattttccttgcgcctccaagcctttctgaactgaaaaacagaatcgtgacacgaggcacagaaacagacgctctgattgaaaatcgaatgaaagccgcaaaagctgagatcgaaatgatggatgcttatgactatgtcgttgaaaacgataatgtcgaaacggcttgcgataaaatcaaagcaatcgttcttgctgaacatttgaagcgtgaacgcgttgcaccaagatataagaaaatgctggaggttgaataatcaatgttagatccgtcaattgattctttaatgaataaattagattcaaaatatacgctggtgactgtttctgcgagacgcgcacgtgaaatgcaaatcaaaaaagaccaaatgattgaacatacgatttcacacaaatatgtaggcaaagctttagaagaaattgatgcaggcctgctttcgtttgaaaaggaagaccgcgaatagtagcacaagtagcaacctatatcagatgtaggttgttatttttttccgtgcggttttgtaaagtgcagagggggagaattcattgctaaacaatcgaaatgtgttactttgcgtgagcggaggcatcgctgtttataaagcctgtgcgttaacgagcaagctggttcaggcaggagcaaatgtcaaagtgattatgactgaatccgcttgccgattcgtttcaccgctgacatttcaggcattgagccgccacgaagtctatacagatacatttaaagaacaaaatccaagcgttatttctcatattgatgccgcagactgggccgacttgattattgtagcgccggctacggctaatgtgattggaaaactggcaaacggcatcgctgatgatatgctgacgacaacattgttggcagcaacggctcccgtttggatcgcgccggcgatgaacgttcatatgtatgaccacccggcagtcaaacgaaacatttctgttctttatcaggacggttatcgttttattgagccaagtgagggctatttagcatgcggttacgtaggaaaaggcagattggaagagccggaaaacatcgtaaagctggccgaaaaacattttgctgaagaaacatccgctcctttagaaggcaagcatgtggtcattacagccggtccaacgcgggaagcgattgatcctgtccggttttttaccaataaatcgacgggcaaaatgggctacgcactagcggaggctgctgttcagctcggcgcacgggtaaccttaatttctgggcctgtttcacttgatcagcctaaaggccttgctgagtttatccctgttcaatcggctgcggatatgcgcgaagctgtgctctctgtgtatgacgcaagcgatatagtcattaaaacagctgcggtagccgattttacgccgaaaacagtatttgaccataaaatgaaaaaacaagacggcggcatgaccttagaactgaaaagaacagtcgatattttgaaagaattgggcgagaaaaagaaagagcagattttggtcggatttgccgccgaaacacaagacattgaacactatgcacgtaaaaagctcgccgctaaaaaccttgatttgattgtggcaaatgatgtgaaagcaaatggggccggttttggtgctgatacgaatatcgtgacaatctttttcaaagacgggcataaacgcgaactcccgatcatgtctaagctcgatgtttcttttgaggtccttcaggagatcgcagccctctcaaaacaaaccggagagcgctcatgaattttgcagaagtcatcgttgatgtcagcaccaaaaatatagacaggccttttgattataaaatcccagaccatctcaagggcatgatcaaaacggggatgcgggtcattgttccgtttggcccccgtaagattcaagggtttgtgacagcagtcaaagaagcatctgacctatcgggaaaatctgtcaaggaagtagaggatttattagatcttacacctgttctgacagaggagcttatgattctgtcatcatggctgtcagacaaaacgctgtcttttaaaataacggcgcttcaagcaatgctgcctgccgccttaaaggcgaaatatgaaaaagaattaaaaattgcacacggagccgatcttccgccgcaagtggaacggctgttttctgaaacaaagacgctgctgtattcagatatacccgatcatgagacgctgaaactgattcaaaggcatgttcaaaaaggggacattgacgtgacgtataaagtcgcgcaaaaaaccaataaaaaaatggtcaggcatattcaggcaaatgcgagtaaagaagagcttgctaagcaggctgagggattgtcccgccaagcagcaaaacagcaggcgattcttcactttctcatctctgagccggaaggtgtgaaaattcctgcggcggaattgtgcaaaaaaacggatacgagctctgcaaccattaaaacccttatccaaaaagggcttttgaaggaaagctatgaagaggtttacagagatccctatcaggacaaaatgttcaaaaaaacagagcccctgccgctgacagacgaacagagggctgccttcgagcccatacgcgagacattggacagcgatgagcataaagtgttcctccttcacggcgtgacaggaagcggaaaaaccgaaatttatctgcaatcaattgaaaaagtactggcgaaaggaaaagaagccatcgtcctcgtaccggaaatatcgctgacgccgcaaatggtcaaccgcttcaagggccgcttcggctcccaggtggcagtcatgcacagcggtttatccacaggagaaaaatatgacgagtggcgtaaaatccaccggaaggaagtacggcttgtcgtcggtgccagatccgccatttttgctccgtttgaaaatctcggaatgataatcatcgatgaagagcacgagtcttcctataaacaggaagaaatgccgcgctatcatgcgaaagaggtggcaatcaagcgggctgagcatcacagctgcccggttgtattagggagtgctacgccgacattagaatcatatgctagagcgcaaaagggcgtatacgagcttctttcactgaagcaccgtgttaaccatcgggtgatgcccgaggtttcgcttgtcgatatgagagaggagcttagaaacggcaatcgctcgatgttttcagttgaattgatggaaaagcttgaagaaacgattgccaagggtgagcaggcggtgctgtttttaaataagaggggctactcttcctttgtgatgtgcagggattgcggctatgtcccgcaatgcccgcactgcgacatttccatgacgtatcatcgttacggccaaaggctgaaatgccattattgcggacatgaagagcctgttccgcacacttgtcctgaatgcgcaagcgagcatatccgctttttcggaacgggaacacagcgagtggaggaagagctgacaaaagtgctgccaagtgcgagagtgattcggatggatgttgacacgacatcacggaaaggcgcccatgaaaaattactgtcagctttcggagaaggaaaagcggatattcttctcggaacgcaaatgatcgcgaaagggcttgattttccgaatgtcacgcttgtcggagtgttaagtgctgatacaacacttcatattcctgatttcagatcggctgaaaaaacatttcagctgttaacgcaagtcagcggccgggcaggcaggcatgaaaagcccggccatgtcatcattcaaacgtatacaccgtctcattacagtatccagctgacgaaaacacacgattatgaaacgttctatcagcatgaaatggcgcacaggagagagcaatcctatccgccatactactatttggctcttgtgactgtttctcatgaggaagtggcgaaagcagcggttacagctgaaaaaatcgctcattttttgaaagcaaactgcggagctgacacgaaaattctcggaccaagcgcgtcgccgatagccaggatcaaagatagatatcgctatcaatgcgtgataaaatacaaacaggaaacccagttatccgctttattgaagaagatactggaacattataaacgcgaaattgaacaaaaacatgtaatgatttcaattgatatgaatccttatatgatgatgtaagatctcacgtcttggagggtaacaaattggcagtaaaaaaggtcgtcacacatcctgcggaggttttggaaacacctgcggaaaccgtgactgtttttgataaaaagctaaaaaaactgcttgatgatatgtacgacaccatgcttgaaatggatggtgtcggactggcagcgccgcaaatcggcattttaaaaagagcggccgtcgtagatatcggggatgacagagggagaattgatctcgttaatcctgaaattttagaaaaaagcggcgagcaaaccggaattgaaggatgcttgagctttcctaacgtctatggtgatgtcacacgtgccgattatgtcaaagtgcgtgcgtttaaccgtcagggaaaaccgttcattctggaagcgcgaggctttttagcaagagccgtgcagcatgaaatggaccacttagacggtgtgctgtttacatctaaaataagtaaatactatacagaagatgaactagcggatatggaaggatgatttgatgacgagaatcgtatttatgggaacgccggatttttcagttcctgttttaagaaccctgatagaggacggatatgaagtagtgggggtcgtcacacagccggaccgtccgaagggcagaaaaaaagtactgacacctcctccggtaaaggaagaggcattgcgccacggcatcccggttcttcagccggaaaaagtcagattgacagaagaaattgaaaaagtgctggcattaaagcctgacctgattgtaacggcggcattcggacaaattttgcctaaagagcttctcgacagtccaaaatacggctgcattaacgttcacgcatcccttttgccggaactgcgcggcggtgctccgatccattattccattctgcagggaaagaagaaaaccgggattaccattatgtatatggtagaaaaattggatgcgggcgatatgatctcaaaagtggaagtggacattgaagaaaccgacaatgtcggaacactgcacgataaattaagcgttgctggcgcgaagctattgtctgaaacggttccaaacgttattgccggcagcatatcacctgaaaagcaggatgaagagaaagcgacgtacgcgcctaacattaaaagagagcaagagctgctcgactggtccagaacgggcgaagagctttacaaccagatccgcggcttaaatccatggcctgttgcttatacgactctaaacggacaaaacttgaaaatatgggcgtcgaaaaaaatagcggcaccaacaacagctgagcccggcacagtcgttgcagttgaaaaggaaggaattatcgttgcctcaggtaacgagacggctctgttattaaccgaactccagccggcaggcaaaaaacgaatgaaaggcgaagactttgtgcgaggcgctcatgttgaagccggtgatgtgttaggagtaaacaatgaaaaaaactagtgttcgtgacatcgcccttgaggcgctgatcaaattagaacaaaaccaggcatacagcaacctgctgctgaaatcggtcattaaatcaaatgaactgagtgatcaggacagagggcttttgactgaacttgtctatggtacattacaaaataagatcgcgcttgattatatgcttaaaccgtttatcaataagcctcaaaaggtaaagccgtgggtgattcagcttcttcgcctatccttatatcaaatggagtatttggagaagattccagacagggcagccattcatgaagcggttgagattgctaaaatccgtggacacaaaggcattgcttcatttgtcaacggcgtgctccgttctattcagcgcgaaggtgttccatcctttgacgcgatcgaagatcctgtccgccggctggcgacagaaacaagccatccggaatggcttgtgaaagagtgggcggatgcgtatggatttgaagctgcggaaaagatttgccgcatccatctcattccgccgaaacagacgctgcgtgtcaatcaaatgaaagcagacagagctgagctgcttgaccaaatggctgctgagggaatcgaagttgaaaaaagcgacctcgctgaagatgctgtgaagctcttaaagggaacaattgccggaactcatttcttccaaaacggcgaagtttctatccaggatgagagctccatgctcgtcgcccgcgcccttgatcctaagtcagatgaaacagtgcttgacgcgtgtgcggcgcctggcggaaaatcggctcatatcgcagaattaatgaagaacaaggggagcgttacgtcgcttgatcttcacaaacataaagtgaagctgatcaaagaagcggcagatcggcttggcctgacaatcattcatgcggaaacaatggatgctagaaaagcgggggaaacgtttgaaaacgaacagtttgaccgaatattggtcgatgccccgtgctcaggtttcggtgttatcagaagaaagccggacatgaaatacacgaaaaaacctgacgacagcgcccgtctagctgaaatccagctgtcgatcttgagggaaatcgcaccattagtaaaaaaaggtggcactcttgtctacagtacgtgtacaatggaccggacagaaaatgatgaagtaatacatgcgtttatacaagaacatcctgattttgaacccgatttgtctcttgaaaagcggctgcctgaaaaggtgagaccctttgttcgggatggaaggcttcaaatccttcctcattatttcggaacagatggtttctttatttgcagcatgagaaagaagggataagcaatggcagaacttaataaaacaaaagtaagaaaagaattgcggacagagcgtccgtctatttattcttttgaattagatgaaatcaaacaatggctgacagacaatggagagaaaccgttccgtgcagcccagatctttgaatggctatatgaaaaacgcgtatcttcttttgaagatatgacaaacctctcaaaggatctgcgtgagaaattaaacactcactttgtgttaacaacgctgaaaacggctgttaaacaaacctctcaagacggtacgatgaagtttttgtttgagcttcatgacggttataccatcgaaaccgttttaatgagacacgagtatggcaattctgtatgtgtaacgacacaagtcggctgccgtattggctgcacattctgcgcgtcaacgcttggaggcttaaaacgaaaccttgaagcaggggaaattgtcgctcaagtagtcaaagtgcaaaaagctcttgatgaaacggatgaacgcgtcagctctgtcgtgatcatgggaatcggcgaaccttttgataactttaacgaaatgctcgctttcttgaaaatcattaaccatgacaagggcctgaatatcggtgctcgccatattacggtctctacgagtgggatcatcccgaaaatttacgaatttgctgatcagcaaatgcagattaactttgcaatttctctgcacgcgccgaacacagaaatcagaagccgtttgatgccgattaacagagcatataaactgcctgatctaatggaagccgttaaatattatattaataaaacgggacgccgcatcagctttgaatacgggctgttcggaggcgtaaacgaccaggtggaacacgccgaagagcttgccgacttgctggaaggagtcaaatgccacgtgaacttgattccggtaaactacgtgcctgaacgggactatgtgcgcacaccgcgtgatcagatttttgcttttgaaaaaacgctgaaatcccgcggagtaaatgtcacaatccgaagagagcaaggacatgacattgacgcagcctgcggtcagcttcgcgcgaaggagcgtcaagacgagacgaggtgatgagggttgttaacagccttaaaaacagatacaggaaaaatccgccagcataatgaagatgatgcggggatattcaaggggaaagatgaatttatattagcggttgtcgctgatggcatgggcggccatcttgctggagatgttgcgagcaagatggctgtgaaagccatgggggagaaatggaatgaagcagagactattccaactgcgccctcggaatgtgaaaaatggctcattgaacagattctttcggtaaacagcaaaatatacgatcacgctcaagcccacgaagaatgccaaggcatggggacgacgattgtatgtgcgctttttacggggaaaacggtttctgttgcccatatcggagacagcagatgctatttgcttcaggacgatgatttcgttcaagtgacagaagaccattcgcttgtaaatgaactggttcgcactggagagatttccagagaagacgctgaacatcatccgcgaaaaaatgtgttgacgaaggcgcttggaacagaccagtcagtcagcattgacacccgttcctttgatatagaacccggagacaaactgcttctatgttctgacggactgacgaataaagtggaaggcactgagttaaaagacatcctgcaaagcgattcagctcctcaggaaaaagtaaacctgcttgtggacaaagccaatcagaatggcggagaagacaacataacagcagttttgcttgagcttgctttacaagttgaagagggtgaagatcagtgctaatcggcaagcggatcagcgggcgttaccaaattctccgcgttataggcggcgggggaatggccaacgtgtatttagctgaggatatcattctagaccgtgaagtcgcaattaaaatcctgcggtttgactatgcaaatgacaatgaatttatcaggcgtttccgcagagaagcccaatccgcatcaagcctcgatcacccgaatattgtcagcatttatgatttgggcgaggaagatgatatttattatattgtcatggaatacgttgaaggcatgacgcttaaagaatacataacagcaaatgggccgcttcaccctaaagaagcgctgaacatcatggagcaaattgtctcagccatcgctcatgcccatcaaaaccagattgttcacagagacatcaagccgcataacattttgattgatcatatgggaaatatcaaagtaacggattttggaattgcgacggcactaagttcgaccacaatcacccataccaattcagttctgggctcggtccattacttatcacctgaacaggcccggggcggcttagccacaaaaaaatcggatatttatgcgcttggaatcgttctatttgagcttttaaccggccgtattccgtttgatggagagtcagcagtcagcatcgccttgaagcatcttcaagcggaaactccttcggcaaaaaggtggaatccatcggtcccccaaagcgttgaaaacatcatactcaaggcaactgccaaagatccttttcatcgctacgaaacggctgaagacatggaagcagacataaaaacagcttttgatgccgacagactcaatgaaaagagatttacgattcaagaagatgaagaaatgacaaaagcgatacctatcattaaagatgaagaacttgctaaagctgctggcgaaaaagaagctgaagtgacaaccgcacaagaaaacaaaacaaagaagaacggcaaaagaaaaaagtggccgtgggttttgctcacgatatgcctcgtttttatcacagctggaattcttgctgtcactgtttttccgtcgcttttcatgcctaaggatgtcaaaatacctgatgtctccggaatggaatacgaaaaagccgcagggctcttggaaaaagaaggtttacaggttgattccgaggtgttggaaatctcagatgaaaaaattgaagagggcctgatggtaaaaacggatcctaaagcggataccacagtcaaagaaggcgccacggtcaccctttataagagcaccggaaaagcaaaaacggagatcggtgatgtgacaggccaaacggtcgaccaggcaaaaaaagcgttgaaggaccaagggtttaaacatgtaacggtaaatgaagtgaatgacgagaaaaacgcgggcactgtcattgaccaaaatccttcagcagggactgagcttgtcccgagtgaagatcaagtcaaacttacagtcagtatcggacccgaagacattacgcttagagacttgaaaacctacagtaaagaagcagcgtctggatatctggaagacaacggattgaagcttgtagaaaaagaagcatactcagatgatgttccagaaggacaggttgtcaaacaaaaaccagcagcaggtacggcagtaaagccgggaaacgaagttgaagtgacattctctctcggaccagagaaaaaacctgcgaaaacagtgaaagaaaaggtcaagatcccctacgaaccagaaaatgaaggggacgagcttcaagtgcaaatcgcggttgacgatgcggatcacagcatctctgacacttacgaagaatttaagataaaagagccgactgaacgaacgatcgaactaaagattgaacccggccaaaaagggtactatcaagtaatggtaaacaataaagttgtcagctacaaaaccattgagtatccaaaagatgaataacaaggagggaaaatatgcctgagggcaaaattattaaggcgctaagcggcttttactatgtactggatgaatcagaggattcagataaagtaatacaatgcagaggaagaggcattttcagaaaaaacaaaattacccctcttgtcggtgattacgttgtgtatcaagctgaaaatgacaaagaaggatatctaatggaaattaaagaaagaaccaacgagcttatcaggccgccaatttgcaacgttgatcaagcggtcctggttttctcagcggttcagccttctttcagcacggcattgctcgaccgcttcctggttctcgttgaggccaatgatattcagccgattatatgcattactaaaatggatctgattgaagatcaagatacagaagatacgatacaagcctatgcagaagactatcggaatattggttatgacgtataccttacctcctctaaggaccaagacagtttaacggacatcatcccgcattttcaggataaaacaacggtatttgccggtcagtccggtgttgggaaatcctcgcttctcaacgcgatcagtccggagcttggattaagaacaaacgagatttctgagcatttgggccgcgggaaacacacaacccgccacgtggagctgattcatacgtccggaggtttggttgcagatacaccaggattcagctcgcttgaatttacagacattgaggaagaagagctgggctataccttccctgatatcagagaaaaaagctcttcatgcaaatttagaggctgtttacatctgaaagagccgaaatgcgcggtgaaacaagctgttgaagacggagaattaaagcagtatcgctatgaccattatgttgaatttatgacggagattaaagacagaaagccgaggtattagcataatgataaaggttgcaccatctattctttccgctgattttgccgctttaggcaatgagattaaagatgtagaaaaaggcggagccgattgtattcatattgatgttatggacggccgttttgtcccgaatatcacaatcggtccgctgattgtagaagcggtccggccggtaacggatctgccgcttgatgtccatttaatgatagaagagccggatcgttatatcccggcttttgcgaaagcaggcgcagatatcctgtctgtgcatgctgaggcatgtccgcacctgcaccgtaccatccagctcattaaagagcaaggagtgaaggccggagtagttctaaacccgcatacccctgtacaagtcatcgaacatgttttcgacgatcttgatcttgttcttttaatgacggtgaacccgggcttcggcgggcagaaatttattcattcagtccttcctaaaataaaagaggttaagcgaatggcggatgaaaaaggaaaaaaagatctgttcattgaagtagacggcggcgtcaacaaagaaaccgctccgctcgtcattgaagcgggcgcaaatttactcgttgccggttcagctgtttatggccagtctgaccgcaaaaaagcaatttctgaaatcagaggaagtaaataagcagctttagaaaagagctgggcatacaatagcctaagctctttttcctgtatgcagagaaaggaatcagagatgaaaacaattaatatcgttgcgggaggcccgaaaaatctcattcccgatctaaccggctatacggatgaacacacgctttggatcggtgttgacaaaggcaccgtcactctcttagatgccgggatcattcctgttgaagccttcggagattttgacagcataacggagcaagaacgccggcgaatagaaaaagccgctcccgcccttcatgtgtatcaagcagaaaaagatcaaacagatttagacctcgcccttgattgggcgctggaaaagcagccggatattattcagattttcggcattacaggcggcagagctgatcattttttaggaaacattcagctactgtatagaggtgtaaaaacgaacataaaaattaggctgatagacaaacaaaatcatattcaaatgttccctcctggtgaatatgatattgagaaggatgaaaataagcgatatatctccttcataccgttttccgaagacatacatgagctgaccctgaccggttttaaatatcctctaaataattgtcatattacgctcggttcaacactatgtattagtaacgaactcattcattcacgaggtactttttcgtttgcaaaaggcatattaataatgataagaagcacggattaagcatgtgctttcattcaattgctaaaaacaatgaacaaggcggttacgggacgttataggaggggacaaaaatgaaattttacaccattaaattgccgaagtttttaggaggaattgtccgggcgatgctgggctcatttagaaaagattaatgcccaggggttcaaagccctctttcaccacataaaaacgcctgccacatatcggggcaggcgttcattttgttatacacgctcaactttaccggatttcaaagctcgagcagatacatatacttttttaggttttccgttcacaaggatacgaaccttttgaagattcgcgccccaagtgcgcttagaagcgttcattgcgtgagaacggttattcccagctgttgtttttttacctgtgataacgcatttacgtgccatttgtttccctcctcacttgcacaaaacatctactttttaacattcatataatcttagatgctttcgatatggatactttaaataatttaccacagctaaaaaacgtttgcaactattgtttcatcatctttcaagaaaattcacttgacatcttgcggaaacagcagcgctatagtatatgtagaggtacggccagcgattattgcctggtcttttcataatggaaaccatatagtagaatagctgtaactctatgcattcgaaggaggaactagtgtgtccattgaattaagaacgaagtacggacagattgatatatctaatgaagtcatcgcgatggttgcaggaggcgcggcggttgactgttacggcattgtcggtatggcctctaaaaaccagattaaagacggactgactgaaatccttcggaaagagaatttcagcaggggtgtccaagttcgccaagaaggagaacagatacatatcgacatgtatatcattgtcagctacggcacgaaaatttctgaagtggcacataatgtccaaacaaaagtaaagtacacagtaaatcaaaccatcggactggcagtggattctgtcaatatttatgtccaaggcgtacgagtgacgaacccgtagttaggaggagtaggattgtctatcagaacattagacggcagaacctttgccgagatgattcttgcgggagcgcagaatctgtctcaaaacgccagtgcagttgatgcactgaacgtgtttccggtgccggacggtgatacgggaacaaatatgaacctgtcgatgacttccggagcaagagaagttgaacaaatggatacggatgatatcgggaaggtgggctccgcgttatctaaagggctgctcatgggagcacgcggaaattcaggagttatcctatcccaattgttccgcggatttagcaaaagcattgaaacgaaaaaagaaattaatgcacttgagtttgccgctgcgctgcaagcaggtgtagacatggcgtataaagctgtcatgaaacctgtagagggcaccattttaacagttgcaaaagacgctgcaaaaaaagcgatgatcttagcagaaaaagaaaccgatatcactgcgctgatgattgcagtgacagaagaagcagaggcgtctttaaaccgcacccctgaattgctacctgtcctaaaggaagtaggagttgtcgatagcgggggcaaaggcctgctctgtgtgtatgaaggtttccttgcttcattaaaaggtgaaactgtacctcagaaagcagttcttccgtcacttgacgacatggtcagcgcagagcatcacaagagcgcgcaaagcatgatgaataccgaagatattgaatttggattctgtaccgaagtgatggttaggcttgatcagacaaaaagagagttcgacgaaggcacgttcaggcaagacctcagccagttcggagattctctgcttgtgattgcggatgaatcgctggcgaaggttcatattcatgctgaagagccgggaaacgtgttaaactacgcccagcattacggtgaattgatcaaaataaaaatagaaaatatgagagaacagcatacctctatcatcagtcaagaaagcaaacctgcagacaacgaaataccgccggcaaagcagccgtatggcattgtgactgtggcgatgggagaaggaatttcagacctattcaaaagcattggcgcttctgttgtgattgaaggcggccagaccatgaacccaagcactgaggatattgttgatgccgtgaagtctgtaaatgcagatacggtatttatcctgcctaacaactccaacattatcatggctgctaaccaagcggccagcgtagtggatgaacaggtttttgtcattcctgctaaaacggttccgcaagggatgtcagccctgctggcttttaacccggatcaagaagctgaagcgaacgaggccaatatgctaagcgccattcagcaagtaaaaagcggacaggtgacgttctcagtcagagatactcatattgacggtaaagatattaaaaaaggcgactttatgggcattctgaatggaacgattatcggcacttctgaaaatcagctgtcagccgcgaaaatgctgctgtcagaaatgatcggagaagatgatgaaatcgtgaccattctatatggtgaggatgcgtctcaggaagaagctgagcagcttgaagcgtttctcagtgaaaagtacgaggagattgaggttgagatccacaatgggaaacagcctctgtattcgtatatagtttctgcagaatagaagggcaatttgcccttctattcttatgtctgcttttaagtgcggcagcgctgtaacgcgcccgcttgccattttatatctgatcaattagtctagaagcaaagcgctaataagctctggttcataaggaggaatagcatgaaatacagaagcgtttttgatattatcggcccggttatgatcggtccgtccagctctcatacagcgggagctgctagaatcgggagagtggccagaagtttatttggcagagagcctgagcgcatcattgtatctttttacggctcgtttgcggaaacgtataagggccacggcacagatgtcgcgattatcggcggattgcttgattttgatacattcgatgaacggattaaaaccgctatacaaattgcagaagctaaaggaattgatatagagtttcgggtagaagacgcagtcccggtccatccgaacacagcaaaaatcaccatttctgatgaaaagggtgagcttgaactgacgggtatttcgattggcggaggaaagattgaaatcacagaattgaatggttttgagctccggctgtcaggaaatcatccggccatattagttgttcataatgacaagtttggcacaattgccggtgttgccaatgttctggcgaaattttcaatcaacgtaggacatatggaagtagcccggaaagatatcggccagcttgcgctgatgacaatagaggtcgaccaaaatattgacgaccacattctcgacgagctgtcgaaactgccgaatattattcaagtgacaaagattgctgactagcgaaaagggtcaggaggagccagttatgtttcgtaatgtaaaagaattaattgagattactaaagaaaaacaaatattgatctctgatgtgatgatagctcaagagatggaagtaacagaaaaaacaaaagaggacatttttcagcagatggatcataacctgtctgttatggaagcggcggttcagaaaggactcgagggagttacgagccaaacgggcttaacaggcggagatgccgttaaattgcaggcctatattcgatcaggaaaaagcctgtctggcccgctgattttagatgctgtatcgaaagccgttgcaacaaatgaagtaaatgcagccatgggaaccatctgtgcgacaccgactgcaggttctgccggtgtggtgcccggtacgttatttgctgtaaaagaaaagctgaatccaacaagagaacaaatgatccgctttttgtttacagccggggctttcggatttgtcgtggccaataacgcaagcatttccggcgccgccggaggatgtcaggcagaggttggatcagcttcaggcatggcggctgcggctattgttgaaatggcaggaggaacacccgaacaaagcgcggaagccatggccattacattaaaaaatatgctaggcctcgtgtgcgaccctgttgcagggcttgttgaggtgccttgcgtgaaacggaatgcgatgggcgcgtcaaatgcaatgattgccgctgatatggcattggcgggcattacaagccgtattccatgtgatgaggttatcgatgccatgtataaaataggccaaacgatgccaactgcacttagagaaacaggccagggcggtttagcggcaacaccgacaggaagagaattagagaaaaaaattttcggaggagcgctaggttcacgtgaaacaacatcagcaaactagtatagctaacattaagggtattgggccggaaacagaaaaaacattacacgaactcggtatttatgacatttctgatcttctgaattatttcccttatcgctatgatgactacgagctgagggatttagaagaagtaaagcatgatgaaagagtcacagtcgaagggaaggttcattcagagccttctcttacctattacggaaaaaaacgaaacaggctgacattcaggcttctggtcggccactatttaatcacagccgtatgttttaaccggccttatttgaagaagaagctttcgctcggctctgtggtgacggtttcaggtaaatgggacaagcaccgccaaaacatctctgttcaggagttgaaaaacgggccgcatcaagaagacaaaagcattgaaccagtgtattctgtgaaagaaaatgttaccgtcaaaatgatgaggcgctttattcagcaggcgctgacccaatatgcagactcacttcctgatcctcttccggaaaagctaagaaaaagctataaactgcctgactattatcaagcgttaaaagcaatgcaccagcctgaaacaagggaagcattaaagcttgccagacggcggtttgtttatgaagaatttttgttgtttcagttgaaaatgcaggcgttccgaaaggcggaaagagagcagacacaagggatacggcagcgtttttcaaacgaagaactcatgagatttatcaaaagcctcccgtttcccctcacaaacgcccagtcacgcgttcttcgcgaaataacagcagacatgtcttctccatacagaatgaaccgccttcttcaaggggacgttggatcaggaaaaacggcagtcgccgccattgcactgtatgccgcgatcctatccggataccaaggagcgctcatggtgccgacagaaattctggccgagcagcatgctgattcgctcgtttcgctatttgaaaaatgggacgtcagcgttgctcttttgacaagctctgttaaagggaagcggcgaaaagaactgcttgagcgtcttgcggcgggtgagattgatattcttgtaggaacccacgctttaatccaagacgaggtggagtttaaggcgctgagtctcgttattacagatgaacagcacagatttggagttgagcagcgcaaaaagcttcggaacaaagggcaggatcccgatgttctctttatgacagccactccaatcccaagaacattagcgatcacagtgttcggtgaaatggatgtatctgtcattgatgagatgccggctggacgaaagagaatcgagacctattgggtaaaacatgacatgctggatcgtatattggcatttgtcgaaaaagaattaaagcaaggcaggcaggcttatatcatctgtccgctgattgaagaatcagacaagcttgatgtgcaaaacgctattgacgtgtacaatatgctttctgatatttttcggggaaaatggaatgtcggccttatgcatggaaagctgcattccgatgaaaaagaccaggtcatgagagaattcagcgcaaatcactgtcaaattctcgtatcaaccactgttgtggaggttggcgtgaatgttccgaatgcaacgattatggtgatttatgacgccgaccgttttgggctatcacagcttcaccagctgcgcggccgtgttggacggggtgagcatcaatctttctgtattctgatggctgatccaaaatcagaaacagggaaagaacggatgaggatcatgtcggaaaccaatgacggtttcgagctgtctgaaaaggatctggaactgagaggtcccggtgatttcttcgggaaaaaacaaagcggaatgccggaatttaaagtggcggacatggttcatgattacagagcgcttgaaacggcaaggcaggatgctgcgaatcttgtggcttctgacgcgttctggaaggagccggaatacgctgtgttaagagatgaattgctgaagagcggagtaatggacggggaaaaattaagctgagtatcagaagtttttggtgttcagccagaaacaatcgttgcattccaatctatgaaattatatactactattagtacctagtcttaattgtccggatggtgtttagatatgagaagaaataagagagaacgccaggaattacttcagcagacgattcaagcaaccccctttattacagatgaagaactagcgggtaaattcggggtgagcatccagacgatacgtttggaccgcttagagctttccatacctgaactgagagaaagaattaagaacgtggcagagaaaacacttgaggacgaagtgaagtccctgtcacttgatgaagttatcggagaaattattgaccttgagctggatgatcaggcgatatccattttagaaataaaacaggagcacgtgttcagccggaatcagattgcgagaggacaccatttatttgcacaggcgaattctttggccgttgcagtcattgatgacgagctggcgctgactgcaagtgcagacatccgctttacaagacaggtaaagcagggtgaacgtgtcgtagcaaaagcgaaagtgacggctgtcgaaaaaggaagaacggttgtcgaagtgaacagctacgttggcgaagaaattgttttttctggacgctttgacatgtatcgttcaaaacattcataaaggtggagcatgcatgagaatagctgtagatgcaatgggaggagaccacgctcccaaagctgttattgacggagttataaaaggtatagaggcatttgatgatctccatatcacacttgtcggtgacaaaacaacgatagaatcacatttaacaactacatcagatcgcatcacggtgctgcacgcagatgaagtgattgagcctacggatgaaccggtccgtgccgtgcgaagaaaaaagaactcatctatggttcttatggcgcaggaggttgcggaaaacagagctgacgcctgcatttcagcaggaaataccggtgcattaatgacagccggtctctttattgtcggaagaattaaaggaattgaccgtccggcgcttgccccgacacttccgactgtttcgggagacggatttcttctccttgatgtcggcgccaatgtcgatgccaaaccggagcacctcgttcaatatgccatcatgggttctgtttattctcagcaagtgcgcggtgtcacttcaccgagagtcggacttttaaatgtcggaacagaagataaaaaaggaaacgaactgacgaagcagacgttccaaattttaaaagaaacagcaaacatcaattttatcggaaacgtggaagcgcgagaccttttagatgatgtggcggatgttgtagtaacagacggctttaccgggaatgttacactcaaaacgctggaaggctctgcgttgtcaatttttaaaatgatgagagacgtaatgacgtctactttgacatccaagcttgcagcagctgtgctgaaaccaaaattgaaagaaatgaaaatgaaaatggagtattcgaattatggcggagcaagtctttttggcttaaaagcgcctgtgatcaaggcgcacggctcttcagattcaaatgctgtattccatgcgattcggcaagcaagagagatggtcagccaaaatgtggctgcgctcattcaggaagaagtgaaagaagaaaaaacagatgagtagtctggaggtttttacatcatgagtaagattgcatttttattcccgggtcagggatcacaatttatcggcatgggaaaagagctttatgagcaggtgcctgctgcaaagcgtctgtttgatgaagccgatgaaacgttggaaacaaaactcagctcgcttatttttgagggggatgctgaagaattaacacttacatacaatgcgcagcctgctttgcttacgacaagcatcgctgttcttgagaaatttaaagaatctggcattacacctgatttcacagcaggacacagccttggtgaatattctgcactggttgcggctggcgctctgtctttcaaagatgctgtttatactgtcagaaagcgcggagagtttatgaatgaagcggtgccggctggcgaaggagcaatggctgcgattctcggcatggatgctgaagcattaaagcaagtaaccgataaagtcacagaggaaggcaaccttgtacagcttgcgaatctcaactgtcctggccaaatcgtcatttccggaacagctaaaggggttgagcttgcatctgaactggcaaaagagaacggcgcaaaacgcgcaattccgcttgaagtaagcggtccgttccattctgaactgatgaaaccggctgctgaaaagctgaaagaggtattggacgcctgtgacataaaagacgctgccgttccggtcatctcaaatgtttctgctgacgtgatgactgaaaaagcagatatcaaagaaaaacttattgagcagctttactctccggttcgttttgaggaaagcattaacaagctgatcgcagagggtgttacgacttttattgaaatcggtcccggaaaagtgctttcaggccttgtgaaaaaagtgaatagacggttaaaaacaattgctgtatcagatccggaaacgatcgagctggcaattcaaacgcttaaggaggagaatgataatgcttaatgataaaacggctattgtcactggcgcatcccgcggaatcggccgctcaatcgcccttgatctggcaaaaagcggagcaaatgttgtcgtgaactactccggcaatgaagcgaaagcaaatgaagtggttgatgaaatcaaatcaatgggcagaaaagcaattgctgtcaaagcggatgtatcaaatcccgaagatgtacaaaacatgataaaagaaacattgtctgttttttctacgattgacattctggttaataatgcgggaattacaagagacaatctcatcatgagaatgaaagaagatgaatgggatgatgtcattaacattaacctgaagggtgttttcaactgcacgaaagctgttacaagacaaatgatgaaacagcgttcaggccgcattattaacgtatcgtctatcgtcggcgtcagcggaaaccctggacaagccaactacgtggctgcaaaagctggcgtcatcggtttaaccaagtcttctgctaaagagctcgccagccgaaatattacggtaaacgcaatagcgccaggatttatctcaactgatatgacagataaacttgcaaaagacgttcaagacgaaatgctgaaacaaattccgctcgcgcgctttggtgaacctagcgatgtcagcagtgttgtcacgttcctagcttcagagggagcccgttatatgacaggccaaacgcttcatattgacggcggaatggtgatgtaagttttttctcgaaaatttcatcgtagtttctctagttttttaaaaacgaatccactataatacttgaggggaggtgaattgctatggcagacacattagagcgtgtaacgaaaatcatcgtagatcgccttggcgttgatgaagcagacgtcaaacttgaagcttctttcaaggaagacttaggtgctgattccctagatgtagttgagcttgttatggaacttgaagacgagtttgatatggagatttctgacgaagatgctgaaaagattgcaacagtcggcgacgctgtgaactacatacaaaaccagcaataagctgatgctaaaagtcccgccgaaacgcggggctttagccctttattcgtgcagttattacagcatgccgcttttacgcgcgctgtatccggtttagtcagagaagcgcggtgaacctgatgtgcctatggaggttactatgtcaaaacactcacattataaagataaaaaaaagttctataaaaaagtagaacaatttaaagagtttcaagaacggatttcggttcactttcaaaatgaaaagcttttgtatcaagcatttacacattcatcttatgtgaatgagcatcggaaaaagccgtatgaagataatgaaaggcttgaatttttaggtgacgctgttttggaactgacgatctccagattcttatttgccaaatacccggctatgagtgaaggagatttgacgaaattgagagccgcaattgtttgcgaaccgtctctcgtttcattggctcacgagctgtcattcggcgatcttgtcctgttgggtaaaggcgaggaaatgacaggcggaagaaagcgtcctgctctattggcggatgtttttgaggcatttatcggagccttgtaccttgaccaaggattagagccggtcgaaagtttcttaaaagtttatgtgttccctaaaattaacgatggtgctttttctcatgtgatggatttcaaaagccagctgcaggaatacgtgcagcgggacggcaaaggctctctggagtataaaatctccaacgaaaaaggacctgcgcacaaccgtgaatttgaagccatcgtatctctaaaaggtgaaccactcggagtcggaaacggccgttcaaagaaagaagccgaacagcacgctgctcaggaagctttagctaaattgcaaaaacaccatacgaaacaataaaatcccccttatgactcagggggatttcagtatgtatgccgtcttatttgaccaatgtttatgatagaattgaaatacttattacataaggaggatcgctatgttcctcaaacgtttagacgttataggatttaaatcatttgcagaacggatttccgtagacttcgttaaaggcgtgacagcagttgtcgggccgaacggaagcggaaaaagcaacatcacggatgccattcgctgggttctcggcgaacaatcggcacgctctcttcgcggcggaaaaatggaagacatcatttttgccgggagtgattcaagaaagcgattaaatctagctgaagttacgcttactcttgataatgatgatcatttcttgccaattgacttccacgaggtgagtgtcacaagacgtgtgtacagatcaggtgagagtgagtttctgattaacaatcagccatgccgcttgaaagatattattgatttatttatggactctgggcttggtaaagaagcattttctattatcagccaagggaaagtggaagagatcctgagcagtaaagcggaggatcgccgcagtatctttgaagaagcggccggggtgcttaaatataaaacgagaaagaaaaaagcagaaaataaactgtttgagacacaggacaatctaaatcgggtagaagatatattacatgagcttgaagggcaggttgaacctcttaaaattcaagcttcaatagcgaaagactaccttgagaaaaagaaagagctggagcatgttgaaattgcgctgactgcctatgatatcgaagagctgcatggtaaatggtcgactcttaaagagaaagtgcagatggcaaaagaagaagagcttgctgaatcgtctgctatttctgcgaaagaagcaaagattgaggatacaagggacaaaatacaagcgcttgatgagtcagtagatgagctccagcaagttttactggtaactagtgaagagctggaaaagcttgaaggccgtaaagaagtcctgaaagaacgaaagaaaaacgctgtgcaaaaccaagaacagcttgaagaagccatcgttcagttccagcaaaaagaaacggttctgaaagaagagctttcgaagcaggaagctgtcttcgaaacgcttcaggctgaggtgaagcagttaagggcgcaagtaaaagaaaaacagcaggctctcagtcttcacaatgaaaatgtcgaagagaaaatcgagcagctgaaaagtgattattttgagctgttaaacagccaggcttcgatacgcaacgaactccagcttcttgatgaccagatgtcccaatccgctgtcacattgcagagactcgcggacaacaatgaaaagcacctgcaggaacggcgtgatatttctgcgcgtaaagccgcatgtgaaacggaatttgcccgaattgagcaggagattcacagtcaagtcggtgcatatcgtgatatgcagacaaaatatgagcagaaaaagcgccaatacgaaaaaaatgaatccgctctgtatcaggcataccaatacgttcagcaagcgagatcaaaaaaggacatgcttgagacgatgcagggagatttctccggcttttatcaaggtgttaaagaagtgctgaaagcgaaagagcgccttggcggaattcgcggagcggttcttgagctgatttctacagaacagaagtatgaaacggccattgaaatagcgctcggcgcttctgctcaacacgtcgtgaccgacgatgaacaatctgcccgaaaagcgattcaatatttaaagcagaattccttcggccgggcgacgtttctgcctctttctgttattagagaccgccagcttcaaagccgtgacgcggaaacagccgcccggcattcatcatttctcggggttgcaagtgaacttgtcacatttgatcctgcgtatcgaagcgtcatccagaatcttcttggaaccgttctgatcacagaggacttaaagggtgcaaacgagcttgcgaagcttctcgggcaccggtaccgcatcgtaacccttgagggagatgttgtgaaccccggtggttcaatgacgggcggcgcggttaaaaagaaaaataactccctcctcggaagaagccgggagctagaagatgtgacgaaacggctcgctgaaatggaagagaaaacagctctgcttgaacaagaggtcaaaacccttaaacaatccattcaggatatggagaaaaaactggctgacttaagagaaaccggggaaggcttaaggttaaagcagcaggatgtgaaaggccagctgtacgaacttcaagttgccgagaaaaatatcaatacccatttagagctctatgaccaagaaaaatctgctctgtcagaaagcgatgaagagaaaaaagcgcgcaaacgcaagcttgaagaagagctctctgccgtatctgaaaagatgaaacagcttgaagaggacatagacaaactgacaaaacaaaaacaaacgcaatcctcaacgaaagagtctctttccaacgagcttactgagctgaagatcgctgcggccaaaaaagagcaggcatgcaagggggaagaggacaaccttgccagattaaagaaagagctcactgaaacagagattgcgttaaaagaagcaaaagaagacttaagcttcttaacgtcagagatgtcatctagcaccagcggcgaagaaaagctggaagaagcagcaaaacataaattgagtgacaaaacgaaaacgatcgaactgattgcattaaggcgcgatcagcgcatcaagcttcagcatgggcttgatacgtatgagcgtgagctgaaagaaatgaaacgcctgtataaacaaaaaacaacgctcttaaaagacgaagaagtcaaactcggacgaatggaagtcgagcttgataatttactccaatatttacgggaggaatacagcttgtcctttgagggggcaaaagagaaatatcagcttgaaactgatccagaggaagccagaaagcgcgtgaagctgattaaactcgcaattgaagagctgggtaccgtgaacctcggaagcatagatgagtttgagagggtcaacgaacggtacaagtttctgtcggaacaaaaagaagatttaacagaagcgaaaaataccttgttccaagtgattgaagaaatggatgaagaaatgacgaagcgctttaacgacacattcgttcaaatccgctcacactttgatcaagtttttcgctccttattcggaggagggcgagctgaactgaggctcaccgatcctaacgatctgcttcattcaggagtcgagattatcgctcagccgccggggaaaaagctgcaaaacttaaacctcctgtcaggcggagagcgtgcgcttactgctatagcgctcttattctcaatcctaaaggttcgtccagtgccgttttgcgtccttgacgaagtagaggctgcgctcgacgaagcgaatgtgttccggtttgcgcagtatttaaaaaaatacagcagtgatacccagtttattgtgattacccacagaaaaggaacgatggaggaagcggatgtgctttatggcgtaaccatgcaggaatccggtgtttccaaggtaatctccgttaagctggaagaaacaaaagaattcgttcagtaacgaggaaagaggttaaaagatgagcttttttaaaaaattaaaagagaaaatcacaaaacagacagattccgtatctgaaaagtttaaggatggccttgaaaaaacaagaaactcctttcaaaacaaagtgaatgatcttgtatcccgttaccgtaaagtggatgaggatttcttcgaagagcttgaagaggttcttatcagcgcggatgtcggttttacaaccgttatggaattaatagatgagctgaaaaaagaagtcaaacgcagaaatattcaagatccaaaggaagtccagtcagtgatttctgagaaactggtcgagatttataacagcggagatgagcaaatttcagaactgaacatccaggatgggcgtttaaacgtaatccttctggtaggtgtaaacggtgtcgggaaaacaacaacgatcggaaagcttgctcataaaatgaaacaagaaggaaaatctgtcgtacttgccgccggagacactttcagagcgggagccattgaacagctggaagtatggggagagcgtacaggagtgcctgtcattaagcagacggccggaagcgatccggcagctgtcatctacgatgctgttcatgctgcgaaagcaagaaatgccgatgtattaatttgtgatacggcagggcgtctccaaaacaaagtaaatctcatgaaagagcttgaaaaagtaaaacgtgttatcgaaagagaagttcctgaagctccgcatgaggtgctgcttgcccttgatgccacgaccggccaaaatgcaatggctcaggcaaaagaattctctaaagcaacaaatgttaccggcattgctttaacgaagcttgacggtacggcaaaaggcggtatcgtccttgcgattcgcaacgagcttcacatcccggttaaactagtcggtttaggagaaaaagttgatgaccttcaggaatttgatccagaatcctatgtgtacggactcttttcagatttagtggaaaaagccgacgattaagaaaaaggccccaacatcttggggcctttttcttttttatcttcttacttgataggcgaaatgataaaggctgttatcagtggataccagtcttgactcaccagaaaaaactctgaatgggatgatgtcatagtaatgaacggaaacagatgtgtaatacgtatagtaaccagcagctggccccaaatacattggaacctcaaatgttccgtttgcatcagttgttcctgaagcagtttgtgttgtgtttccgaccttcgtgtccgcttcaaatcttacgggcgcgtttggcactggctgtccgttttggtcgagtaatttgccgcttactgtaatattgtacttgactcgccaatattgaccttgcccgtaattgattttaccgtatacccctccatctgtgctgatatttgtgattgaggccttataaggtgcctcagcagcgtctgcttgctgtgccgggaaacctattgtaaacagggctgccagacacaacataaacaataaaccgatttttttcataaaaatcctccttaaaatagggttcatatacaatatcggaataaattggatgatatttagcgtattttggaaaaggttaatcgtcgctttgacaagataaaaacttgacagtgtcaataaaaccgtgtaaactaagttatcgtaaagggatttgacttaacaaaggggagagctcaaatgtcactcgaaaagacaacgagaatgaattatctgtttgatttttatcagtcgttgttgacgtcaaaacagaagagctatatgtcgctttattatttggacgatttctccctaggcgaaatagccgaagaatatgaggtttcaagacaagctgtttatgataacatcaaacgaacagaagcgatgcttgaacaatatgaagaaaagctgctccttttgaaaaagtttcaggagcgtaaagagatgtttaataagctgaaggagcttgcttccggttcaaaagaagaggaagaaattacagctctgattgaagcgcttgagaaattagattaggaggcggcaaactatggcatttgaaggattagccgaccgactgcagcagacgatttctaaaatccgcggaaaagggaaagtcagcgaacaagatgtaaaagatatgatgcgtgaggttcgtcttgcgctgcttgaggctgacgttaactttaaagtagtcaaagattttgtcaaaaaagtaagtgaacgcgctgtaggccaagacgtcatgaaaagtctgacgcccggccagcaggtcattaaagttgttcaagaggaactgactgagctgatgggcggcgaagagagcaaaatcgccgtcgcaaaaaggccgccgactgttattatgatggtcggtctccaaggtgccggtaaaacgacaacaagcggtaagcttgcgaatctgctgcgcaaaaagcataatcgcaaaccgatgctggttgctgccgatatttaccgcccagccgcaattaagcagctggaaacactcggcaaacagcttgatatgcctgttttttctcttggcgatcaggtcagtcctgtagaaatagctaaacaggctattgagaaagccaaggaagaacattatgactatgtcattttggatacggcaggccgcttgcatatcgaccatgaactgatggatgaactgaccaacgtcaaagaaatcgcgaatccggaagaaattttcctggttgtcgattcaatgaccggtcaggacgctgtgaatgttgccaaaagctttaatgaacagctcggtttaaccggtgttgtgttaactaagctggatggagacacacgcggcggggctgcgctttctattcgcgctgtcacaaacacgccaattaagttcgcaggtttgggcgaaaagcttgatgcgttagagccgttccaccctgaacgcatggcatcaaggattctcggcatgggcgacgtgctgacattgattgaaaaagcacaggccagcgttgatgaagacaaagccaaagagctggaacaaaaaatgagaacgatgagcttcacattggacgattttctggagcagctcgggcaagtcagaaacatggggccgcttgatgagcttctgcaaatgatgccgggtgcaggtaaaatgaaaggcctgaaaaacatccaagttgatgaaaaacagctgaatcatgtggaagcaatcattaaatcaatgactgttcttgaaaaagaacagccggatatcatcaatgccagccggcggaagcggattgcgaaaggaagcgggacatccgtacaggaagtcaaccgtctgcttaagcagtttgatgaaatgaaaaaaatgatgaagcagatgacaaacatgtcaaaaggcaagaaaaaagggtttaagctaccttttatgtaatcggttatacatgataaaaccgttgttaagaaaaaacactttacaaacacttttatcattgttaatatactatcttgttgaaatattttcggaggtgctagtaaaatggcagtaaaaattcgtttaaaacgtatgggagcaaaaaaatctcctttctatcgtattgttgtagcagattctcgttcaccacgtgacggccgtttcatcgaaacagtcggaacttacaacccggttgcaaaaccagcggaagtaaaaattgacgaagagcttgctcttaaatggcttcaaactggagcgaaaccatctgatacagttcgcaacttgttctctagccaaggaatcatggaaaaattccacaacgctaaacaaggcaagtaatgactgatcaacacttggaagatttgattgtccacattgtgacgccgcttgttgatcatccagatgacattcgcgtcataagagaagaaaccgatcaaaagattgcgctgcgcttatctgtccataagtcagataccggtaaagttatcggaaagcaaggccggactgcaaaagcgattcgaacagctgtatttgcagctggcgcacagtcttctaagaaagttcaatttgaaatatttgactaaaagggagagggccggcacctcccctttttttacacgcaaaaaaagggtaaactgatagaagcttaggcaaaatagaaaagcctgggcgagtaaaagttttaaaagcggggagcttggtgcgatgcaaattattcaccgtgtagccgttatgcaagtcttaaccgagcgcagtaaagaaaagcttttagcttcttttgccgaaaagaaacaaatgcttgaacgagaatgcagccagctctattttcagcttagaaaacatgagaaagaacagcaaaaccctgatatgatagaacaatttaaaaaggcaatagaaaagcgaaaagatgatatgaaaatcatcgattttcaaattgctcaagtacatacattgcagcttggcagtgagttgaaagaaaaggaagtcgatgcgctgctgacgattgaagccggggatgactggcatgagaaaacagcagcgaacaccatcgtcataaaagacggaaaagtaattgaaattcgccagaggtgatcatatgacaaagcgatggtttaatgtaggcaaaatcgtaaatacccacggaatcaaaggcgaagtgcgggtgatttcaaaaacagattttgccgaagaacgatacaagccgggaaacacgctgtatttgtttatggacggccgtaacgaaccagtggaggtaacggtaaacacacatagactgcataagcaatttcatctcctgcagtttaaagaaagacaaaacctaaatgaagtagaagagctgaaaaacgcaatcattaaagttcctgaagaagaattaggagagctgaatgagggtgaattttatttccacgaaattattgggtgtgaagtatttactgaagaaggcgaactcatcggaaaggtcaaagaaattttgacgcctggagccaatgacgtttgggtcatcggacgaaaaggaaaaaaagacgcactcattccttacattgaatcagtggtcaaacatatcgatgtcagggaaaagaaaattgagattgaactcatggaagggttaatagacgaatgaaaatcgactttttgacgctgtttcccgaaatgtttgaaggcgtgctcggctcatcgattcttcaaaaagcccaggaaaaagatgcggtgcagtttcaagtcgtaaatttccgggagtactctgataacaagcacaatactgttgatgattatccttatggcggcggggcaggcatggttctcaagccccagcctgtttttgacgcggtcgaggacctgacatcaaaggcagccgctgctccgcgtattatcctcgtatgcccgcaaggtgagcgttttacccaaaaaaaagccgagcaattagcaaaggaagagcatttgctgttcatttgcggccattatgaaggctatgatgaacgcattcgcgagcacttggtaacggatgaaatatcaattggcgactttgttctgacgggcggtgagctccctgcaatgatgatcgcagacagtgtggtcagactgcttccgggtgtactgggtaaagaggcttcccatattgaggattccttcagcaccggacttttagagcacccgcattatacaagaccggcagattacaaaggtttaaaagtgcctgaaacactcttgtcaggaaaccatgcaaaaattgaagaatggcggaataaagaatcgatcagaaggacctacctaagacgtccggatctgttgaaagactacccgcttacagagcagcaaagaaagtggatttctgaatgggaaaaagaatagattttattgcataggctatgaaattgtgataagatactacttgtggcttaagcgggcttatccgctgcaagcttgaaaacgatgttccgctgtgccggtttttgtggccaagagcatctgttggaaggagttgaaaacgatgcaaaaactaattgaagatatcacaaaagaacagcttcgtactgatcttcctgcgttccgtcctggtgacactttacgtgtacacgttaaagttgttgagggtaaccgtgagcgtatccagatctttgaaggtgttgtgattaagcgtcgtggtggtggaatcagcgaaacgttcacagttcgtaagatttcttacggtgttggcgttgaacgtactttcccagtacacacaccaaaaatcgcgaaaatcgaagttgtacgttacggtaaagtacgccgtgctaaactttactacctgcgtgaacttcgcggaaaagcggctcgtattaaagagatcagacgataatgataacgaacgaaaagagcttgttacctgtaacaagctctttttttatacagaatttgaaaatgccggacaggcatcgtaaaatacataaaggacaacaatgaatcatgcatactgaagataaaggcggtgttcgtgtcacatgacaattcaatggttcccgggccatatggcaaaagcaagaagggaagtaaccgaaaaattaaaattaatcgatatcgtatatgaattggtagatgccagaattccaatgtcatcaagaaacccaatgattgaagatattctaaaaaacaagccgcgaattatgctgttaaacaaggctgacaaagcagatgcggcagttacacagcagtggaaagagcactttgagaagcaggggatccgctctctgtctattaattctgtaaatggacaagggttaaatcaaattgtgcctgcatcaaaagagatcctccaagaaaaatttgaccggatgcgtgcgaaaggtgtgaagccgagagcgattcgcgctttgattatcggcattccaaacgtcggaaaatcaacactcatcaaccggcttgcaaagaaaaacatagcaaaaacgggagacagacctggtattacaacctctcaacagtgggtcaaagttgggaaagaattagagctattagatacaccgggaattttgtggcctaaatttgaggatgagcttgtcggtttgagactggcagtcaccggggctattaaagactcgattatcaatttgcaggacgtggccgtgtttggtcttcgttttctcgaagaacattacccagaacggctcaaggagcgttatggccttgaggagatcccagaggacattgccgagctgtttgatgcaataggtgaaaagcggggctgtctcatgagcggcgggctcattaactacgataagacgactgaagtcatcattcgcgatattcgcactgaaaagttcggcaggctgtcatttgaacagccgacgatgtaaaggcgcgcagaaatgcgggtctttattttttcttggctgaaccgatacatacagtaagggagaagagaaagtgaatacattaaccgtaaaggacattaaagaccgtttgcaggaagtgaaggatgcacaagacccatttatttcccaatgcgaaaacgacccgagaaaaagcgttcaaacgcttgtagagcaatggcttaaaaagcaagcgaaagaaaaagcgctgaaagaacaatgggtgaatatgacttcctatgaaaggctggcaagaaacaaaggatttcgcttgattgcaggtgttgacgaggtcggccgggggccattggcaggaccagttgtcgccagcgcagtcatccttccagaggaatgtgaaatacttgggctgacagactccaaaaagctttcagagaaaaaacgcgaggaatattacgagcttattatgaaggaagcactggcggtcgggataggaattgtagaagctactgtgattgatgagatcaatatatatgaagcttcaaaaatggcaatggtgagagcgatacaggatttgtcggatacacctgattatttgcttgttgacgcaatgacacttccgctcgacacggctcaggcgtcaattataaaaggcgatgccaaaagcgtgtctattgcggcaggtgcgtgtatcgcaaaagtgacgagggaccgaatgatgagcgcttatgccgaaacgtatcccatgtacggctttgaaaaaaataaaggctatgggacaaaagaacatttggaagctctcgctgcatacggcccaactgaattgcaccgcaaaactttcgctcctgttcaatctttcagataaatcaccatggacaaggaggcacctttttaaaatgaacatacgaaatgatgtgcaaaaggcgctgcagcaccttttcgggcgtacagccgtcccgcaggaaacatcaaaagtaaacgaagcgctaaacggggagaagcgtctcctcttaggaaaagtgcttcgtttactaggagatcagcatgccctgatccaagtcggcaatcaaactgttcagggaaaacttgaaactcagcttcgtcctcaggcatactattggttttcctacgaaaaaaaaacggcagagcaaacaggccgtcttcaggtcgttcaaagctttgatcaaaatcctaaaaccattcaggatgcagctggcaaacttttaaatgctatttcagtgaagacgtcaaacgcagctctcatgatgacaggagcgatgctgaaaagcaaaacacccgtaacagaaaatgatatcaaaacagctgtccgctggatggacacgctgccttcgcaagacacaaaaaaagcagttgaaacggttctcttcgctttaaagcgtgatcttcccattcactccgagattttgaatggtgttcacgctgtgaaatcgcctgttccgttgcatcagcacgtatcccagctgctacaggcaatcgaccaaaaccctcagcagagccaaatgatgtcaaagctaaaggaagcagttacggtgcttttaaatagtgaaatcgatgtccatgcagaacggctgattgataagcttatttctttaaccgacaatacgaaagcaccttctccgacgaatacagctggaagcagggagcttagcacaccagctggctcccccggaaaagccagcctgccgattgcaaatcacacagcagaacagggaagcatacaagaagagcctgttaaaacagcagcagacattccaattaaagaagcccgccagctgctcgtgaagctgacggaatctgctgaaaaaaacagtctccaaattgtgaaagaagcagcaaattggattaaagcggctgcttcatcgggtgatagtaagtcacttgcagcttcagctgttttacaagcggcacaagtcacagaccaggaagccgaagtctttttaaaggctgttcagcagacagcaccccatttggcggataaggcagatgttctttctttcttatccaaagtgaaaacggcaatcggcgcaagggacgaggttgcgttcattaaagcgtttgaacaaggaagcgcagtcacatctggcgaaatgcaatccatcaagctggctctttctgccttaagagcatcgcatgaggtagccgaaccagtcaaacaagaagccgatcagctttttcataaattaaatggccagcttttcatgcagcaggaccatccatcatacagccaaattgtaatgtcatttccgatgttttcgaagtcaggggttcaggacatgactgttctgtttaaaggaaagaaagaagcggatggaaagcttgatccttcccattgccgccttttgtttttgctgcagcttgatacactaaaagaaaccgtcgttgattgcttggtacagcaaaaagtcatgaccattacaatagagactgatttcgagctgcaggctgcgatcgatccgatggtgcccgcgcttaaacaggggctaaaggaaatggggtacagcctttcaggggtaaacgctaaaaaaagggttcacaccgaagaaaaggcttcaatcgatcaatatataacaagtatcagtgatcaggaagtggatgtgaaaatatgaaagagcagacaccgatcagaaaagctgttgctctccattatgacgaacaaaaagacaaggcgccgagagtgattgccacagggaagggccatgtagctgacaacattatcaaagaagcgaaaaaagcaggggtcccgattcaagaagatcggacccttgtcgaattaatgcgccatttgacggtagatgatcaaattcctgaagctctttatgaaacggtagccgagattttttcattcatttacaaattggacgaaagcgtaaaaaacgaaaaatagctaaaatattccccatcctcctttgaaatttatgtttttaataaagtaaaagtttgaatgtttagaaggattaaaagattttgcatcgaactgtagacaattcttccagtattattatagaatgaaagcgcagtctattttagttttgttacataagttaggaggatgggaaatgaatatccatgagtaccagggaaaagaagtcctcagaaaatatggggtatctgttcctgaaggtaaagtggcttttacagcagaagaagcagttgagagtgcaaagagcttatccagctcggtttatgtcgtaaaggctcaaattcatgctggcggtcgaggcaaagctggtggggtaaaaatagcaaaatcattagacgaagtaaaagcgtatgccgaagaactattagggaagaccctagttacacatcagacgggtccggacggccaagtaataaaacgcttacttattgaagaaggctgcgatattaaaaaagaatattacatcggtctagtgcttgaccgcgccacttcaagaatcgttttgatggcttctgaagaaggcggaacggaaattgaagaggttgcggagaaaacaccggaaaaaatcaaaaaagctgtcattgatccggctgttggccttcaaggctatcaagccagagaaattgcattcgctattaatattccaaaagagctcgtgggaaaagctgctaaatttatgcttggactatataaagcgtttgttgagaaagactgctcaatcgccgaaatcaatccgcttgttgttaccggcgacggaaatgtgatggcgcttgatgcaaaattgaattttgacagcaatgcgttgtaccgacaaaaggacattatggaatacagagatttggatgaagaagatccgaaagaaattgaagcgtccaaatatgatctaagctacatttcccttgatggaaatatcggctgtatggtaaacggcgcggggcttgcaatgtccacgatggatattatcaagcattatggaggagaaccggccaacttccttgatgtgggcggcggtgcaaccgctgaaaaagtcacggaagcatttaaaatcattctttctgatcaaaacgttaaagggatttttgtcaacattttcggcggcattatgaaatgtgatgtcatcgcagaaggggttgttgaagcgactagacaagttggtttgacattgccgcttgtcgtccgtcttgaaggcacaaacgtggatctagggaagaaaatccttagtgaatcaggattaaacattacatctgcggaatcaatggctgacggcgcgcagaaaatcgtatccttagtttaagaaagaatgaaaggcaggggaccaaataatgagtgttttcattaataaagatacaagagttattgtgcaagggattacaggttctaccgctttatttcatacgaagcagatgcttgaatacggcacaaatatcgttggcggtgtaacacctggaaaaggcggaacagaagcggaaggtgttcctgtatttaatacagtggctgaagcagttcaaacaaccggcgctaacgcgtctgttatatatgtgcccgcaccgtttgcagctgatgcgattatggaagcggtagatgcggagcttgatctcgtgatttgtatcacagaacatatcccggttttggatatggtgaaggtcaaacgcttcatggaaggcaagaaaacgagactgatagggccgaactgtcctggtgtcattacgcctgaagaatgtaaaatcggcattatgcccggatacatccataaaaagggtcatgtaggcgttgtatcacgttcaggaacattaacatacgaagcggtgcaccagctctcagaagcgggtgtagggcaatctacagctgtgggaatcggcggcgaccctgtaaatggaacaaactttattgacgttttaaaagcgtttaacgaagatcctgacactcacgcagtcatcatgattggcgaaatcggcggtactgccgaagaggaagcggcagagtgggtaaaagccaacatgacaaaaccggtagtcggttttatcggcggtaaaacagcacctcctgggaagcgcatggggcatgcaggcgccattatttccggcggaaaagggacagctgatgaaaaaatcaaaacccttaatgcatgcggaatcgaagttgcagagacaccttctgtcatgggtgaaaccttaatcaaggtgctgaaagagaagaacttgttcgaaacttgcaaaacgcattaataaaaaagggacagccgtcaaggctgttcctgctttttctaacaaaaggaggtcaatctattggatcaggccgctgcctgcctaacgatttgcagaatcaatcaattattatccccatcccttctattaaaatggtggaaagccgatccgtctatgtcgctgacatcacccgtgttacaaacggttactcgtgatcaaataaaagcagctgcattaaaaaacgaaatagaacaattttatccaaagctcccgcgtgtacttgctgcttatcgtgagcaaggcattaacaccatccctatttcttcaaagcaatatcctttctggcttaaaagcatttatgatccccctgccgtactgtttgcaaaaggtgatatgactcttctttcgaaagggagaaaaattggaattgtagggacaagaaatccaacagcttatgggaaacaagttgtcaatcatcttacaaaagagatctgtcgtaaaggttgggtgattgtcagcggactggcgtctgggatagacggaatgtcccatgctgcaagtattaaggcgaaggggcggacaattggcgtcattgcaggcggatttcaacacatttatccccgagaaaaccttcagttagcagatcacatggctaaacaccatatcctgctgtcagagcacccacctgaaactaaaccccaaaaatggcatttccctatgagaaaccgtattatcagcggactaagtgaaggcgttattgtcgttcagggcaaagaaaaaagcggttcgctgattactgcctatcaagcattggaacaagggagagaggtatttgccgtacccggttcattgtttgacccttacgccggaggtcctataaaactgatccagcagggggctaaagccatatggtcagcagaggatattttcgaggaacttcctgagagaaacgttcaatatacggaacccttttgaattatcgtttgacaaacggtattgtaatatttaataatagtgaggatttaaagttgcatattgttttctatttaattaatgacgttcatgataaagaatgaaatgttgaaagccaaataaagacagctgcaaaaataaaattgaaatatcttgaaaagagagagaacacctcttgagggggatgaaaatgtctgattatctagtcatcgtggaatcgcccgctaaggcgaaaacgattgaacgttacttaggtaaaaaatataaagtaaaagcatcaatgggacatgtccgggatcttccaaaaagtcaaatgggagttgacatagaacagaattttgaaccgaaatatattaccattcgaggtaaaggcccggtattaaaagagctgaaaacggctgcgaaaaaagccaaaaaagtgtatctcgcagccgaccccgacagagaaggggaagcgattgcatggcatttggcacacagtcttgatttagatctcaactcagactgccgtgtggtgtttaacgaaattacaaaagacgctattaaggaatcgtttaagcatccccgcatgatcaatatggatttagtggatgcacagcaagcgagacgtattttagacaggcttgtcggatataaaatcagtccaatcttatggaaaaaagtcaaaaaagggcttagcgcaggacgcgtgcaatccgttgccctccgtttgattattgaccgtgaaaaagagattaacgactttaagcctgaggaatattggacaattgacggtacgttcttaaaaggtcaagaaacctttgaagcgagctttttcgggaaaaacggcaaaaaacttcctttaaatagtgaagctgatgtaaaagagattctttctcagctcaaagggaatcaatatacagttgaaaaagtaaccaaaaaggaacgcaaacgtaatcctgctttgccttttaccacttctaccctgcagcaggaagcggctcgcaagctcaatttcagagcgaagaaaacgatgatgattgcacagcaattatatgaaggaattgatttaggaagagaaggaacggttggtctgatcacgtatatgagaacggattcaacccgtatttcaaatacggctgttgatgaagcagctgcatttattgatcagacatatggaaaagagttcctaggcggaaaacggaagcctgcgaaaaagaatgaaaatgcccaggatgcccacgaagcaattcggccgacatcagttcttagaaaaccaagtgaattaaaagcagtcctcggcagagaccaaatgagactgtataaattaatttgggagcgttttgttgccagccaaatggcaccggctgttctcgatacaatgagtgtcgacctgacaaacaacggtttgacatttcgtgcaaatggaagtaaagtcaagttttccgggtttatgaaggtgtatgttgaaggaaaagacgatcaaatggaagaaaaagaccggatgctgcctgacttacaagaaggcgacacggtattatcaaaagatatagaacctgagcagcattttacccagccgcctccgcgatatactgaggcccggcttgttaaaacccttgaagaacgcggtatcggccgtccatccacatatgctccgacacttgatactattcagcggcgcggctacgtggcattggataataaacgtttcgttccgactgaattaggtcagatcgttcttgacttgatcatggagtttttccctgagatcattaacgttgagtttacagctaaaatggagagagatcttgatcatgttgaagaaggaaataccgaatgggtcaagattatcgataatttctacaccgattttgaaaaacgcgtcaaaaaagccgaatcggaaatgaaggaagttgagattgaaccagagtatgctggagaggattgtgaattgtgcagttctccaatggtatataaaatgggacggtacggtaaattcttagcttgctccaacttccctgactgccggaacacgaaaccgattgtgaaacaaatcggtgtgaagtgcccgagctgcggagaaggaaacattgttgagcgaaaatcgaaaaagaaacgggtgttttacggctgtgaccgttatccggactgtgaattcgtatcatgggacaaaccaattgaacgaaaatgcccgaaatgcggaaaaatgctcgtcgagaaaaaactcaaaaaaggtatacaagtccaatgcgtggaatgcgattataaggaagaaccacagaagtagcggtgagcagggtcttgctcaccttctttgtgtgttaaaagaaggccttgaataataaaataggagatgtgaaagatgaaccaacaaacagtgaatgtaatcggagccggactcgcaggaagtgaagcagcatggcagcttgccaaacgtgggattcaagtcaaattgtatgaaatgcggccagttaaacaaacgcctgcgcaccatacagataaatttgctgagcttgtctgcagcaactctcttcgctctaatacacttgctaacgctgtcggtgtattaaaggaagaaatgcgtgcgcttgattcagccattatcgctgcggctgacgaatgttcggtgcctgccgggggcgctcttgcagtagaccgtcatgaatttgccgcaagtgtgacaaatcgggtgaaaaatcatccaaacgtaaccgttattaatgaagaagtgactgaaattcctgaaggccctactatcatcgcaacgggtccgttaacatctgaatcgctgtctgcccagctgaaggagctgactggagaggactatttatatttttatgacgcagcggcgccaattgtagaaaaagacagccttgatatggataaagtgtacctaaaatcccgttatgataaaggtgaagcagcatatttgaactgcccgatgacagaagaagagtttgaccgttttcatgaagcattaacatcagcagaaacagtgccgttaaaagaatttgaaaaagagattttctttgaaggctgcatgccgattgaagttatggcaaaacggggtaagaaaacaatgcttttcggtccgatgaaaccggttggtctagagcatcctgttacaggaaaacgcccttatgccgtcgttcagctcagacaggatgatgctgcgggaacactttataatattgtaggattccagactcatttaaaatggggagaccaaaaggaagttctcaagttgattccaggacttgaaaatgtagaaatcgtcagatatggcgtgatgcacagaaacacatttattaactctccaagcctgttaaagccgacttatcaatttaaaaaccgcagtgatctgttctttgcaggccaaatgacgggagtagaaggatatgtggaatcagctgcctcaggacttgtagcaggcattaatgcggcgaagcttgtattgggagaagagcttgtgatcttccctcaggaaacagcaattggcagtatggcacattatattacaacaacaaaccagaagaacttccagccgatgaatgcaaactttgggcttttgaaagaattgccagttaaaattaaaaataaaaaagaacgaaatgaacaatacgcgaaccgtgcgattgaaacaattcaaacaatttcgaaaacaatataggtattgattgcaacctgagcgcgatttgtgataccatttaaaagcccttcctggggaggtattaggcatggagaatgttaagaatttcgtaaagttattcgttgaatatttacaaattgaaaaaaattattcacaatatactattgtgaattatgtggattcaattgaagaattcgagactttcctgcgcgttcaaggtataaatggatttgaagaagctgcatatcaagatactaggatttttttgacagaagcctatgaaaaaggtttatcgagaagaacaataagcaaaaagatatctgcattaagaagcttttataagtttctgatgcgggaaaagcttattgaagaaaatccgtttcagcttgttcatctgccaaaacaggagaaacggataccgaagtttctatatcaaaaagagcttgaggagctgtttgaagtttcagatataagccagccggccggaatgagggatcaagcgctgttagagctgctctatgccaccggaatgagggtcagtgaatgctgttccataactattaacgacgttgatttatttatggacactgtgcttgttcacggtaaaggcaagaagcagcgctatatcccctttgggtcttatgcccgcgaagcgttgaaggtatacatgaatagcggaagacagtgcttgctgatgaaggcaaaagaacctcatgatctattattcgtaaatcaaagaggcggaccgcttacagcccgtggcatcagacatattttaagcgggcttgttcaaaaagcgtcaagcactttacatatccatccgcatatgcttcgacatacgttcgccacgcatctgttaaatgaaggagcggatttgagaagcgttcaagaactgctcgggcattccaatctgtcttctacacagatatacacgcacgtttcgaaggaaatgttgagaaacacatatatgtctcaccatccaagagcatttaagaaaaattaaaggaggccctttatgtcatcttttcatgcgaccacaatatttgccgtacagcataaaggacgaagcgctatgtccggagacggccaagtaacatttggtcaggctgttgtcatgaaacacacggcacggaaagtgagaaaactgtttaacggcaaagttcttgctggctttgcgggatctgttgcagacgctttcactttattcgaaaagtttgaagctaagcttgaagaatataacggcaacttaaaacgggcggctgttgagcttgcgaaggaatggcgcagtgataaagtgctaagaaagctcgaagccatgctgattgttatgaatcaggatactttgcttctcatatcgggaacaggcgaggtgatcgaaccagatgacggcattctcgcgattggatcaggaggcaattacgctttggcagcgggaagagcactgaaaaagcatgccggtgaaagcatgtctgcaagtgagattgccagagccgcgttagaaacagcaggcgaaatttgtgtttacacgaacgatcaaatcatactggaagagcttgaatagaaaggacttgaggcgcatggaaaaaaaaccgttaactcctagacagattgtagatcggttagaccaatatattgtcggtcagcaaaatgcgaaaaaagctgtcgccgtggcattaagaaaccgctatagaagaagtcttctggatgaaaagctgaaggacgaggtcgttccgaaaaacattttaatgatgggtcctaccggcgtcgggaaaactgaaattgccagacgaatcgctaagctttcaggtgcgccatttatcaaaattgaagcgactaaatttaccgaagtcggctatgtaggcagagatgttgaatcaatggtcagagatcttgtggagacttctgttcggcttataaaagaagagaaaatgaatgaagtaaaggaacaggcagaagaaaatgcaaacaaacgcattgttcgtctgttagttcctgggaagaaaaaacaatctggcgttaaaaatccgtttgaaatgttttttggaggcagccagccgaatggtgaagatgaggcggagagccaggaagaagcaaacatcgaagaaaaaagaaaacgaatggcacatcagctggctttaggagagctcgaagactactatgtaacagtagaagtcgaagagcagcagccttctatgtttgacatgctgcagggctcgggtatggagcagatgggtatgaacatgcaggatgcgctgagcggattaatgccaaagaaaaagaaacggcgcaaaatgacagtcagagaagccagaaaagttctgacgaatgaagaagcaagcaaactcatcgatatggatgaagtcggccaggaagcagttcagagagcagaagagagcgggattatctttatcgatgagattgataaaatcgcaaagaacggcggtgcatcttcttctgccgatgtttcaagagaaggcgttcagcgggatatccttccgattgttgaaggttctaccgttgtcacaaaatatggttctgtaaaaacagaccatgtattatttattgcagcaggagcgtttcatatggccaaaccgtctgatttgattcctgagctgcaggggcgtttcccaattcgtgtagaactgaacaaactcacggtagacgacttcgtgagaattttggttgagccggataatgcgctgctgaaacaatatcaggcattattgcagacagaaggtatatctcttgaattttctgacgaagctattcataagattgctgaagttgcttatcatgtgaaccaggacacagataatatcggtgcgagacgccttcatacaatacttgaacgcctattagaagatttgtcgtttgaagctccagatgtaacgatggagaaaataacgattacaccacagtatgtcgaagaaaagctcggaacgatagccaaaaacaaagatttaagtcaatttatattgtgaaaaatttaatatgaggaatgtttaggaggattatttatcatggctttattacaaaaaacaagaattattaactccatgctgcaagctgcggcagggaaaccggtaaacttcaaggaaatggcggagacgctgcgggatgtaattgattccaatattttcgttgtaagccgcagagggaaactccttgggtattctattaaccagcaaattgaaaatgatcgtatgaaaaaaatgcttgaggatcgtcaattccctgaagagtatacgaaaaatctgtttaatgtccctgaaacatcttctaacttggatattaatagtgaatatactgctttccctgttgagaacagagacctgttccaagctggtttaacaacaattgtgccgatcatcggaggcggggaaagattaggaacacttattctttcacgtttacaagatcaattcaatgacgatgacttaattctagcagaatacggcgcaacagttgtcggaatggaaatcctaagagaaaaagcagaagaaattgaagaggaagcaagaagcaaagctgtcgtacaaatggctatcagctcgctttcttacagtgagcttgaagcaattgagcacatttttgaggagcttgacggaaacgaaggtcttcttgttgcaagtaaaattgctgaccgtgtcggcattacccgttctgttattgtgaacgcactcagaaagctggagagcgccggtgttatcgagtctagatcattaggaatgaaaggtacttatatcaaggtactaaacaacaaattcctaattgaattagaaaatctaaaatctcattaatcacaaaaagaaccctttttgagggttctttttttatttcaaataaaggaaatcaataagctttatttcctgggttgaaagtctttctatgtaataattttaataaattttgcatttttcttcaaaaagtttcaaaaatgccgaaaagaaaggagaaaaaacagaaattctgctattttcaggcttatatcaaggcgagaaatgtagttctaacaatctaggactttatacctagttgcaaaatagataattgtgaggacatttttttacacgaacttcatagactttatgcctgttatttcttacaataagcatatagttttacaattctcgacaaggatattgagggtgaaaaaaactgaaatggaggtaagtggatttgagcttattttctggaacgatacaaaatcttgaaaatgccttgagtagagcggatattaagcaaaaagtcataactaataatatcgccaatatagatacaccgaactataaggcaaaaaaagtctctttccaaaatttattagatcaagaatcctcgcgtcttgaagcgataaaaacagactatcgtcatgttgatttttctgatactgattcgaattattcaattgttgcgagcggagatacatcgtatcagcaaaacggaaacaatgttgatgttgacaaagagatgacagaattggcgcaaaatcaaatcaactatcaagctttggttgaaagaatgaacggtaaatttaattcgctgaagaccgtattaacaggaggaaaatgatgacagcttttcatagcttaaatgtttcagcatcggctttaacagctcagcgagtcagaatggacgttgtatcatctaacttagcaaatatggatacgacaagagctaagcaggtgaatggagagtgggtgccttacagaagaaaaatggtttcccttcagtcaaaaggtgaatcgttctcttctattctcaattctcaaatgagcggaagcgggaatgctggaaacggtgtgaaggtttcaaaaattacggaggatgattcagattttaatcttgtctatgatccgacagaccctgatgcaaacgctgaaggatatgtacaaaagcctaatgttgatccattaaaggaaatggttgatcttgtcagcagcaccagatcatacgaggcgaatgtcacggcgatgaatgccacaaagggaatgctgatgaaggcgttagaaatcggaaagtaggtgaatgaatgtgattaatgcaatttctccttttcaggttcaaaatactcaaaacactcaaaatgcaacaaatcaagtaaacaatagccaaaaaacagattcttcaaatcaaacaagcttttcggagcttttaaaaaactctattagttcgttaaatgagtcccaagtagcttctgacaacatgactaatgccttggctgcaggaaaagatgtaaatcttgatgaggtcatgatcgctgctcaaaaagccagcatctctctaactgcagcaacagagttccgcaataaagctgtggaagcttatcaggagattatgagaatgcaaatgtagggggtctgacgatttagagaaagagtggaatgaccgggggttaacatgaatcgtactctaatgcaaatgaaaaacaaaacgagtgagttttggaaaaatagatctaaattacaaaagattttaatggttagtgctttagcggcaattattattattggaattattattagtgtttttgcttcgaattctaaaatggcgccgctgtacaaagatttgtctgccgaagaagcaggacaaatcaaagaagaattggatgcaaaaaaagtgccaaacgaactttcgaatggcggtacagtgattagtgttccggaggatcaggttgattctttgaaagtgcagatggctgcagaaggacttcctaaaacgggatcaattgattattcgttttttggacagaatgccggctttggtttgacagacaatgagtttgatatggtgaaagtgaaagctacacagacagaactgtcaaacttgatcaatgaaatggacggtattaaaaattcaaaagtaatgattaatctcccgaaagacgctgtgtttgtcggtgaggagcaatctgcagcatctgcatcaatcgttttgcagattcaaccgggttatacacttgatcaaagccaaatcaacggattatatcatctggtatctaaaagcgtgccaaacctaaaagaagataacatcgtcatcatggaccaaaattctacatactacgacaaatcagacagcgatgcagggtcctacgcggatagttattcttctcagcaaggaattaagtctcaagttgaaaaagacattcaaaaacatgtacagtcattgctgggtacgatgatgggccaagataaagtcgttgtctccgttacagcagacattgatttcacaaaagaaaatcggacagaagacattgtcgaacctgtggataaagaaaacatggaaggcattgcagtcagcgctgaaaaggtatctgaaacatatcagggcgacggtgcagccaacggcggaactgccggaaccggcgaggaagatgtaccaaattataaggctgacggtgaaaataccgaaagcgggaactatgaaaaaaacagcaacaaaatcaattacgaggttaaccgaattcataaagaaatcgctgaaagtccttataaggtcagagatttagggattcaagtaatggtagagccgcctgatgccaaaaacacagcgtcgctatcaactgaaagacaggatgatatacaaaaaatcctttcaactgtagtcagaacatctttggataaagatgaaacgcaaaatcagaatttatctgatgctgatatcaataataagattgttgtttccgttcagccattcgacggaaaagtcaatttggatacaaatacggaaaaatcctctggtatcccgctgtgggcatatattgtaggcggtgttttaatcgcagcgattattgttctgatcattatgcttatcagaaagaaacgggcgcaagaggatgaatttgaggaatatgagtatgaggttcctcaagaacctatcaatttgcctgatatcaacgaagaggaaaatgaaacagcggaatcagtcagacgaaaacagcttgaaaagatggcgaaagacaagccggaagattttgcaaaactgctgagaagctggctggccgaggattaggaggaattagaaatggcgagacgtgatcaagataagcttacaggaaaacaaaaagcagccattctcatgatttccttggggttagatgtgtcagcttctgtctataagcacttaaccgatgaagaaattgaaaggcttactctggaaatatcaggtgttcgaagcgtcgatcatcaaaaaaaggatgaaatcatagaagaatttcataatatagccattgcacaagattatatttctcaaggcggtttaagctatgcaagacaagttctggaaaaggcgcttggagaggataaggcagagaacattctaaacaggctgacttcttctttgcaggttaaaccatttgattttgccagaaaagcggagcctgaacaaattttgaattttatccagcaagagcatccgcagacgatggcgttaatcttgtcttatttagatccagtgcaggccgggcagattttatccgagctgaatccggaagtacaggctgaggttgcgagaagaatcgcggttatggatagaacatctccagaaataattaatgaggtagaacggattctggaacaaaaattatcttctgcatttactcaggattatacacaaacaggcggaattgaagctgttgtggaagtgttaaacggggtagacagagggacagagaagacgatcttggattcattggaaattcaggatcccgatcttgctgaagaaattaaaaagcggatgtttgtcttcgaagatattgtcacacttgataaccgtgccattcagagagtcattcgcgatgttgagaacgacgatttgctcctttcattaaaggttgcaagcgaggaagtcaaagaaattgtattcaacaatatgtcacagcgtatggttgaaaccttcaaagaagaaatggaatttatgggccctgtacgcttgaaagatgtagaagaagctcaatcgagaattgtaagtatcgtcagaaagcttgaagaagccggtgaaattgtaatagcaagaggcggaggggatgatattattgtctaatatcattaaacaagaatcatctatttctccacaaaaggaaaaaagaaaactttctatacaagaggtgcgtattgatcattctcaccttttgcaggctgaagagaacccggaggcgcttatggcccgagtgaaagaggaagctgatcggatttctgagcaggcaaacagtcatatagaaaatattcgccgtcaaattgaacaggagaaaaacgattgggcggctgaaaaacagaagcttattgaagaagcaaaagccgagggctttgaacaaggagtagcgctgggcaaagctgaggcaatgaaacagtatgcagaactgatcggccaagcaaacagtataactgaaatgtccagaaaagctgttgaggacaagcttgaagacgctaatgaagaaatcgttgagcttgccgttgccctagcaaaaaaagtttggcagcaaaagtctgatgataaagaggctttcctcctgcttgtacaacaggttataaacgaagtgaaggaatatgacgatatatcaatttatgttgatccatattactatgagacaatctttcagcaaaaagatgaaatccagcagcttctttataaagaatgtcggcttggcatatatgctgatgaaaaagctcaaaaaggaacctgttatattgaaactccttttggcagggtagatgcgagtgttgacacacaattgatgcaattgaaagataaacttctgacagcgctggaagcaggtgcagctgaatgaagacacagagtctgatagattgtatagaaatgacagactcgtataaacggtacggaaaagtcaagcgggtcatcggcctgatgattgaatcaaaagggccagcaagctcaattggcgacgtgtgcctgatttatgcaaaaggacaatctgggaaagtcattaaagctgaggtagtcggcttccaggaagaaaatattttgcttatgccttatttagaggctgcgagcattgcacctggcagcattgtagaagctactggggaatcacttcgggttaaagttggaaccggactgattggacaagtcatcgatgcttttggagaaccgcttgacggaaaacttctgcctaaagggctttcgcctgtatcaacggagcaatcaccgcccaacccgatgaaacggccgcctatccgtgaaaagatgggtgttggagtcagatcaattgacagcttgctgacagtcggtaaaggccagcggattggaatttttgcaggaagcggtgtcggaaaaagcaccttaatggggatgatcgccaagcagacagaggctgacttaaacgtcattgcacttgtcggagaacgcggacgagaggttcgggagtttattgaaaaagatctggggaaagaggggctgaaacgatcgattgtagtcgttgccacctcagaccagccagcattaatgagattgaaagcggcatatacagcgactgcaattgccgagtatttccgagataaaggccaaaatgtcatgtttatgatggattctgttacaagggtggcaatggcgcagcgagagattggactggctgcaggagagcctccgacgacaaaaggttatacaccttcagtgttcgctattttacctcgtttactagaacgaacaggtgcaaacgagcatggaaccattacggcattttatacagtgttggtagacggggatgacatgaatgagccgattgccgatactgtacgcggaattttagacggacatattgtgttggacagggcgcttgccaataaaggccagtttcctgcagttaacgtactaaaaagcatcagcagggtgatgtcaaacatttcaacaaaacagcatctggatgcggcaaataaattccgtgaacttttatcgacatatcaaaattcggaagatctcattaatatcggagcttacaaaagaggatcatccagagaaattgatgaagcgatacaattttatccgcagcttattcaatttttaaagcagggaacagacgaaccggctttattggaagaaagcattgctgcattaactagtttgacaggaaatgaggaataaacgtggcttatcaatttagattccaaaagctgctggaactaaaagaaaatgaaaaagaccaatccttatccgagtatcagcaatcagtttctgaatttgaaaacgttgctgaaaaattatatgagaatatgagcaaaaaggaattgctggaacaaaataaggaaaagaaattaaaaagcggcatgagtgtacaagaaatgaggcactaccaacaatttgtctcaaatcttgataatacgatctatcactatcaaaagcttgtcattataaaaagaaatcaaatgaatcaaaaacaagaaattttgacagagaaaaacattgaagtgaaaaagtttgaaaaaatgcgtgaaaaacagtttaaaatgtttgctcttgaagataaagctgcagaaatgaaagaaatggacgatatttcgattaagcagtttatgattcaaggccattaggagcgaatgtaatgtccggcaaaaagaaagaatcaggtaagttccgttcggttttgcttatcattatcctcccgctgatgtttctattaatcgcaggggggattgttctttgggctgctggtatcaatgtcataaagccgatacaggatgctgcggcaaaaacgccggttcttaaagaattggtccctgaaaccgaaaataaaaaaggcgcagcatcaagtaaggatagcagtaatacggcagctctggaaaagaccattaaggatcaaaaaagtgaaatcagtatattgaataaagatttagaaacaagtaaatcagaaatcgataggctcaatcaaaagatccgttcacttgaaaagacggctgaggatcaaaaaaagtcatcagaagatcatactgaaggatcagcagactcgaaagcttcttctgaaaatgacaaagtgatcagtgtgtacaaaagcatggacagcggaaaggctgctaaaattattgcccaattaaaggagcaagaagcactgaaaatattgaatggcctaagcaaaaagcagcttgctgacatattggcgaaaatgactcctgagcaagcagcaacctatacagaaaaaattgctgccagccaagaatagggggaatgaaaggtgaagctgcttgaattagccggacctttgctgcaaaccacaacgggttctgccgctaaaaacatgaaaagtagccaaggagtttttcaaaactggcttatgtctgaggctggattgaaggaactttcagaacaaggaaagggtactcctaattccgaagatcagcttttagcagatgcgcttaaaaagatcggtgactggctaaatgcaagtcctgaagatcaagacaaacaaaatgcggatcttttgcaaacattaagcaaactgacagggaagcaattggatgcgaatgctctgcaaatgttgcaaaatcttttgcaagcagttgaatcaaaaatgtcaggcgggacggatcaattgctcacagaaacggagaaaatcttttcagaagctaaaacggctctgagtgccaatgattctgcttctgacattaatggagcactgaagtctgatacagagcaatcaaatcaggaaaatgaagtatccgagcctgctaaagagcttatctatatccagatgttcattagccagctcgtagaagggaataagctgactgatcgcgggaatggcaatgaagctcatgccatttaccaaaatggagatcaattcctttctgcattagaaaagaagggtgtatctcaacaactaattcaggatcttaaacagcaaatattcactaaagctgagtcaagttcaaaactttactcgatgacagcgtcagagctgaaaagttttcaaagcttaatggatcaaatgtctatgcttcctcaaaaagggaccaaagaatggagtttagctgaaagccagctgaaagccttcttgttatcgaaatcatccgaatcatcacaagactttgggaagcgtgttctcacaccgctctcgcagagttcatccagcaaaaatgcatcggatgtttctggaagtattcagcctgtagatagtaaatcaggactccaaatgctgttttcggggtatcggggcataggaggagttcaaacacttgatctgcagcagatgtcatctgatataccaaatgccgaaacaaaaacggtggctgatcaagtgattaatgcgtggaagcagatgaaatatacgcctttcggcagatcgacgggaagtttcactattcggctgaaccctgaacatttaggatttgtcacaatcaagctgacaaatgaaaatggaatgtttcagagtaaaatcatagcatctagccaatcagcaaaagaattgcttgaacagcatcttcctcagctgaagcaatcattgccgaatatggccgtccaaattgaccgttttactcttccggtccaaagcggggatcagccgatatacggccagcttgctgatgaacagaaacagcagcaagaggggcagagacagcaaagacagaaaaagcaatcaaatgattttggcgatctgctcgatgaagtgtcgatggttgaaatggaggaagaagaatgacttctataagttcagaatataaactgcctgaaaaaacgaacactgtgtcgacgaacaacagcagcttggggaaagacgagtttttaaaaatattaatgactcaagttcaaaaccaagatccgcttaacccgattgacgataaagaatttatcagccagatggcgactttttcaagcttggagcaaatgatgaatctgaatacgacaatgactcaattcgttgaaaaccaagatccgtttacaacgtatgttgattggatgggaaaagaagtatcttggactgatggtaaaagtgcaacagataaaacaggcacaataagctctgttaaacattttaaaggaaattattatctcgttcttgatgatgggaccgagatcagtcctgcgaatgtcatgtctgtgggacaatcatctaaataaaaacatctgggggaatatattatgttacgttcactttattctggaatcagcggtatgaagaactttcaaacaaagcttgacgtaatcggtaacaacattgccaacgtaaatacagtaggattcaaaaagagccgtgtgacctttaaagatatggtaagccaaaccattgccggcggttctgctgctggtgcaacaatcggcggaacaaactctaagcaaatcggtttaggttcatcatctggcacaattgatacaattcattcaacaagcgcgacacaaagcacaggaagaacacttgatttagcaattgacggcgacggttacttccgaattgatacaggtgacgggacagcttatacaagagcagggaacttctatttagataatactggaacactggttacaggtgatggctaccatgtactaaatatgaatggcggaacaattaaaattcctactgatgctcaaagctttagcattggttctgatggaaaggtgtcaattgttgatgctgaggggaaaacacaagacgggggacaaatcgggattgttacttttgccaacagtgacggcttagataaaatcgggagcaacctataccgtgaatctttaaactctggaacggccagtgcagcgaaccagcctggtgacggcggaactggtgctcttaaatcaggatttctcgaaatgtctaacgtcgatttaactgacgaatttactgaaatgatcgtagcccagcgcggattccaatcaaactcaaaaattattacaacatctgatgaaatccttcaagaactggttaaccttaaacgttaaggagggaggggaggcgagtaatcgcttctccgctgttttatgattaaagtaacccgtttgaacgggcagccctttacactgaatgcgctatttattgaacagattgaatgttttccggatactacaattactctgtcaaatggtaagaagtttgtagtaaaagaagatgaagaagctgttctggaaaagatcgcagctttctaccgaaaaatacaaatatttgcaatggatcaaggaatagaggaaccggaatgaagaaaaagttaatgatcatattactaattattcttatcgtaattggtgctctcggggcggcggcttattttgttttaggcggaaagtccgaaaaaagtgaagcgaaaaaaagtattgatgaaatcgttgcgtcttctgttgatgtagaagagatcacaacaaatttaaagtctgataacattatccgtcttgctattaaacttgaaactgattctgataaatcaaaagaagaacttgagaaacgtgatttccaagtgaaagacgctgttatatcactgctggctgatacgaatgctgatcagattgagggagacaagggaaaagaaacctttaagaaggaactaaaagataaaataaatagctacctccaagaaggaaaagtagaaaaagtgtatattacctcctttaatctgcaataaagcataatttgacagaatacggaggtgaggaaaatgtcaggagaagttctctcccaaaatgaaatagatgcactgctctctgcaatatcaactggtgaaatggacgctgaagagctgaaaaaagaagaaaaagagaagaaagtcaaggtttatgatttcaaacgtgcgctgcggttttctaaggatcagatccgcagtttaacgagaattcatgacaattttgcaagacttcttaccactcatttttctgctcagctcagaacctatattcacatatctgtcagttctgttgatcaggttccgtatgaggaatttatcagatcgattccaaacatgacgattctgaatctatttgatgttcatccgatggaaggaagaattatgatggaggtcaaccccacgatagcttatacgatgatggatcgagtcatgggcgggattggaatcagtcataacaaggttgacagtttgacagaaattgaaacaaaaatcatttctaatttatttgaaaatgcactgggtaattataaagaagcttggcagtcaattgctgatattgaaccggaaatgactgagtttgaagtgaatccgcaatttgttcagatggtatctcctaatgaaacagtcgtggtgatctcgctcaatactcaaattggtgaaatcagcggtgtcattaatctctgtatcccgcatattgtactcgagccgctcataccgaagctttcagtccactattggatgcaatcagaccgaaatgagccaaagcctgaggaaacaaagtcgcttgaaaaacgtatcatgacagcacaaatacctgtcgtggccgagctcggcacatctgaactgacgatagaagagtttttaagtttagaagtcggagactgcataactttggacaaatcagtcacggatcctcttactgtattggtcggagataagccgaaatttttaggacaagccggccgggtgaatcgaaaacaggcagtgcaaattttagatcacgacataagaggtgaacaagatggagaataatagattatctcaagatgagattgacgcgcttcttaacggtactggcagcacgcttgatgagccagagattccggaagtagatgacttatcggaaatggagcgtgatgcgatcggtgaaatcggtaatatttcattcggcagttctgcgacagcactgtcaacgcttttaaatcaaaaggtcgatattacgactccaagcgtaacggtcattccaagaagtaaaatcagcgatgcgtttcctgaaccgtatgtagcgattgaagtgaattatacggagggcttcagcggaagcaacctgttagtcgtggaacaaagtgacgcggcgatcattgcggacttaatgatcgggggagacggaaaaggtgcggacccttcactgggtgaaatccatttaagtgcggttcaagaagcaatgaaccaaatgatgggatcggctgccacatcaatgtctactgtattcagtaaaaaaattgatatttcacctcctcgggttgaattgctggatgttactgaagaaaagggtacagaccgtattcctgatgatgaaatgctggtgaaagtttctttcaacttaaaggtgggagaattaatagactccagcattatgcaactttacccattgacatttgcgaaagatttaatttcaagccttatgaactcagaaagtgcagaggaagaagaaacggtgcagcctgaagttacatacgaacagccgaaagagcctgtgacgccagagccgcgtattgaaccgaagcaacagcagcagccgccaaaaaggcagggaacagcaaaaaaagcagcgccagttcaggtttcaccggtggaattttccgcgtttgatccaaacgaagctgtacaagcccctattcataatctggatatgcttttggatatcccgctttcgattactgttgagcttggcagaacgaagagaagcgtaaaagagattttagagctttctgccggaagtattatcgagcttgataaattagccggtgagcctgtagatattttagttaatcagcgtatcgttgccaaaggcgaggtcgttgtcattgaagaaaacttcggagtaagagtcactgacattttaagccaggcagagcgcattaataatttaaaataacgaaacacaaggagagagatagattatggcacatagaattttaattgtagatgacgcagcatttatgcgaatgatgattaaagatattttagttaaaaatggttttgaagttgtggcggaagctgaaaatggagcacaagcggtagagaaatataaagagcattcacctgaccttgttactatggatatcacgatgccagaaatggatggtattacagcattaaaagaaattaaacaaattgatgcgcaggcaagaatcatcatgtgttctgctatgggacagcaatcaatggttattgatgccattcaggccggcgctaaggatttcattgtgaaacctttccaggctgaccgtgtgcttgaagcaatcaacaaaacattaagttaaagggtgtacgactgttgaaaaagagtcaatattttattgtttttatttgttttttcgttttattcagtgtacatccgattgctgctgccgcggcagactctgataattcaactgtaaacgaatggtttcaaaagaaagatgaaaaaactgcagatcaatcagagcaaaagaaagaaaaaacaacaaaaactgctgatgagacggagggagcggctgctccttctgtctcagcttttgattttgtaaagatgattttcgctttattgtttgttatcgcgctgatttacgggctggttaagctcatgaacaaaagaaatcggctcctaaagccttttcaatatgttgaaaatattggcggcacatcggtcggccagaacagatccatacaattgatcaaggtcggaaaaagtgtgctcatcgtcggtgtaggagagacgatccagctgctgaaagaaattgaggatgaaaaagagattgaagtcattctcagtcagcatgaagaggcaatgtcaagcaaaatagagtggcaaaagtttgtgaagccgcttaagagttctgaacatcagccgcagcaaaaactgccttcattttcaaaagcattaaaagagcaacttgaagagttaaaacaaaaccgttctgaaggaaagaagaaaggcccacgtcatcatgaatgagtttataaatattttcagttcaagcgatccggaaaacgtaagttcgactgttaaattactattattgttaactgtattttcagtggcgcctggaatattgattcttatgacttgttttactcgcatcgtcattgttctgtcatttgtcagaacttcacttgcgacgcaatctatgcccccaaaccaggttctaatcgggcttgcgctgtttttaacattttttattatggctcctactttttcagaaattaataaagaagcgctgaccccattaatggacaacaaaatcagcttggatgaagcgtatacgaaagctgaggaaccgattaaagaatttatgagtaaacacacaaggcagaaggatctggcgctgtttatgaattacgcgaaaatggataaacctgaatcattaaaggatattccgttaacaacaatggttccggcttttgccatatcggagcttaaaacagcatttcaaataggttttatgatttttatcccttttttaattatagatatggtagtggcgagcgtcttgatgtcaatgggaatgatgatgctgcctccagttatgatttctctgccctttaaaatattactttttgttttggtagacggctggtatttaattgtgaaatctttgcttcagagcttttagggtaggtgctaaacgtgagttcagaatttgtaatttctatggcggaaaaagccgtatacgtaacgctgatgatcagcgggccattattggctattgctttactggtcggtttaattgtcagcatatttcaggcgacaactcaaatccaggaacagactttggcgtttattccgaaaatcgtggcggttctcctggctctcattttttttggtccgtggatgctgtcgacgattctttcatttacaacagagctgttttctaatttaaatcgttttgcagggtaatgtagagatgaattcaattattgacttatttcctgcttttttattggtttttattagaatctctgctttttttgtaacgattccgctatttggacatcgaaatgtgccagctgttcatcgcataggttttgctttttttcttgcggtcatttgtttcagcaccattgataaaccgccctctttggagatagatgagcactatatgcttttggcgtttaaagaagctttggtcggcctatgtctgggtttaattgcttatatgatgattgccgcagtgcagattgccggctcgtttattgattttcaaatgggattttcaatagcaaacgttattgatccgcaaaccggtgcacaaagtccgttgattggccagtttatctatacgatggcacttttgtttatgctaagtgtcaatgcccaccatttgttgctggatggtatttactacagctttcagtatatttcagttgatcaggcatttccgaatttcggcgatgaaaagtttgcctattttattgcgaaaagctttaatgcaatgtttattatcgcttttcaaatgtcagcgccggttgtggccagtttgtttctagttgatttagcattaggtatcgtggctcgaactgttccgcagttaaatgtatttgtggtcggtctgcctttaaagatcgctgtcagtttcattatgctcattgtatgtatgtccgttatcttcgtcgttgtccggaatgttttcagtttaacgattgaaacgatgcggaatcttttagcattggtcggtgtttcttaatgaagcttagagttgacctgcagttttttgcgggagagaagacagaaaaagccactccgaaaaaacggaaggatacgcgaaaaaaagggcaggtagccaaaagctcggatgtcaataccgccgtttctttactggtaatattcctttcgcttattgcaattggtccgtatatgagagacaggctgctgtcattcatagaaacattttataccgaatcgctcacaatgaagctctcagaatcaaatgtgcatacattgtttgtcagcttattaaaggatatgggcatgatactcgcaccgatcttgctagttgctcttgttgcaggagtcgtaagcaactatatgcaggttgggttcttattttctgctgaagtgatacagcctaagcttgaaaaactggatccgatcaaaggctttaaacgaatatacagtatgagggcgattgtagagctgattaaatcaattttgaaaatcgtagtcgttggttttgcggcttttgctgtgctttggctgcattatggagaaattctccggcttcctctcctgacacccgaagaggcactttctttcgtttcaaaactcactttgtggatgggactaagcggtgcaggtgcattgttgattcttgctggtctcgactatttatatcagagatttgactatgagaaaaatatcaaaatgtcaaaacaagatataaaagatgagtacaaaaaatctgaaggagacccgattatcaagtctaaaattaaacaaagacagcgggaaatggcgatgaggcggatgatgcaggaagttccaaaagcagatgtcattatcacaaacccgactcactatgcgattgctttgaaatatgatgaagaaaaaatggacgcaccttatattgttgcaaaaggcgtcgaccaccttgcgttaaaaatcaggaaaattgctaaagagcatgatgtcatgatggtagaaaacagaccgcttgcccgtgcgttatatgatcaggtggaaattgaccaggcagtgccggaagaattttttaaagttttagcagaaattctggcttacgtatataaaacaaaacaaaaagtatattgaatttttcgatttaaaaggagagaaaaaacagcatgtcaacaagagatttatccgttttaataagtgttgtcctcattgtggcgatgctggtgattccatttcctccatggctgttaagtattttgatcattattaatatttctcttgcattgatcgtgcttctcaccacaatgaatatgcaggaagcgcttcagttttcgatttttccgtcactgttgctgcttttgaccctatttcgtttgggcttgaacgtctcaactacccgttcaattctttcacacggtgaaggaggtaaagtcgtcgagactttcggaaatttcgttgtcggcggaaatgtattagttggactcgttgtatttatcatccttattattattcagtttatcgtcattacaaaaggtgctgaacgtgtttccgaggttgcagcaaggtttacgctggacgcaatgcctgggaagcagatgagtattgatgctgatttaaacgcagggatgattaccgaacaggaagcgaagcatcgccgcgaaaaagtggcaagagaagcagacttttatggagcaatggacggtgccagtaaatttgtaaaaggtgacgccattgccggaatcatcattgtgatgatcaatattattttcggaatcgtgatcgggatgcttcagcagggcatgtccattcaagaggctgcttcacactttacgatgctgactgtaggggatggaattgtttcgcaaatcccggcactgttaatttctacggctacgggtattgtggtcacaagagctgcctctgaaggaaacttagggcatgacattacaggccagctgtttgcgtatccaaagcttttatacgtcgcagcagctacgatcatgcttttaggtattttcactccgatcggcatccttctgacggggccgcttgcgggattgcttgcttttggcgcatatacactatctaaatcaggtaaggaaaaagaagaagtggatgagattcttgaggaagaggctgaggtggacgagcttaaaagccctgaaagtgttgttcagcttctgcatatagatccgatagaatttgagtttggatatggcctgataccgcttgctgatgccaatcaaggcggtgatttattagaccgaattgttatgatacgccgtcagttggctttggaactcgggcttgtcattcctgtcgtgcgaatcagagataatatagcgttgcagcctaatgaataccgattgaaaattaaaggaaacgaagtagcaaaaggcgagttgttgcttgatcattatttagcgatgtcgcctactcctgaggacgatctcattgaagggattgaaacagtggagccttcattcgggctgccggctaaatggattagcgaagcggtaaaggatgaagccgacatgcttggttatacagtagttgatcctgcatcagtcgtttcaacgcatattacggagaaaattaagcagcatgcccacgaattgatcggaaggcaggagacaaaacagctgatcgatcacttgaaagaatcgtatccagtcctggttgaagaggttacgccgaatccattgtctgtcggtgatattcagaaagtgcttgctaagcttttaaaagaaaaagtttcaattcgaaacttagtaacgatttttgaaacacttgctgactatgggaaattaacaacagattctgatcttttgacagagtatacaagacaagcgcttgctaaacaaattacagcccagtttgccaaagaaaatgaagtgttgaaggttgttacttgttccggccgtgtagaaaaagcaatagcagacggtgtgcagcagacggaacacgggaactatttatcacttgaaccagatatttcagaaagtatagtgcgctctgtcgccaaagaagctgaacagctctcattacgtcaggaaaccgcgattcttctttgctcgccgcctgtcagaatgtatgtgaagcagcttctggaacggtacttccctgatcttccggtactctcttataacgaacttgaggcgaatgttgaggtacaaagcattggagtggtggatatttaatgaaaataaaaaaatttactgctgcttcaatgcaagaagcggcacttctcatcagaaaagagttaggtaatgaagcggtcatattaaattcgaaaaaaattaaaaagcgaaaatggtttggcctcgtcaacaagcctgctgttgaagtaatcgccgtattggatcaggactttcttgagaaaaaaacgcctcagaaggcagctgaaccgaaacaaacattaaaaactccggtcagcagtccaaaaatagaggagagaacatatccccctcaaattccggcgcaacaggagctaggtgatttttcagcatatcaatctgtacttcctgagccgctgcgaaaagcagaaaagcttttgcaagaaacagggatcaaagagtctacgaaaacgaacactctgaaaaaattgcttcgcttctctgttgaagcaggcggcttgactgaagaaaatgttgtcggcaaacttcaggaaatactatgcgatatgctgccctcagcagacaagtggcaggagccaattcattcaaaatatatcgttctctttggttcaacaggggctggtaaaacaactacactggctaaactcgcagccatatctatgcttgaaaaacataaaaaaatcgcttttattacaacagatacgtatcgtattgcagctgttgaacagttgaaaacatacgctgaactgctgcaggctcctctggaagtttgctatacaaaagaagaatttcagcaggcgaaggagctattttctgagtatgatcatgtgtttgttgatacagctggaagaaacttcaaagacccgcaatacattgatgaactgaaagaaacgattccttttgagagcagcattcagtcatttcttgttttatccgcgactgcaaaatatgaagatatgaagcatattgtcaaacggttttcatccgtccctgtcaatcagtatatttttacgaaaatagatgaaacgacttccttaggttctgtatttaatatactggcagaatcaaaaataggtgtcgggtttatgactaacggccagaatgtgcctgaggatatacagactgtatctccacttggttttgtgaggatgctgtgcagatgaacagatatgaccaagcagcaactttacgggcgaaaatggaaaaacgtgagcgcgttctgccaatggtttattcacaaaaagcgaagacacttgctgtcatcagcggcaagggcggtgtcggaaaatccaatattaccttaaatatggcacttgcgctgcaggataaaggtaagaaggtgctgctcatcgaccttgatatcgggatggggaacattgatatattaataggaaattcatcgtctgccacgataatcgatgttttaaccgatcgtcagcctttgctgcagtcattatccgttggcccaaagggtttgcggtatatatcagggggaaccggtcttgatgtgatgtttcagctcgatcagagaaaatggacgttttttgccaatgaactttctcatgcattaagccagttcgattatgtgctgtttgacatgggagcaggcttatcaaaagatcaactgccttttattttatcagcagaagatattttgattattacaactcccgagccgacggccattatggacgcatacagcgctgtcaagcacttggttttgacagaaaataagctttcaatgaaggtggctgtcaatcggtgccgtgaccaaaaggaagggcttgacgcttttgcccgcctctcccgtacaattcatatgtttttggatgttcaggttcagtttgccggttccgtttctgacgatgtgatcgtgagcaaagcggttgtcgaacaggttccttttttcataaaaagccctcaggcaaaagccagccggtcagtccgtattttagcggacgccttgtttgaaagagaagaaacgagacacaaagaagacaaacagacatttattgagaaattatcttcttttttaatgaggagggcttaatttgattcgtgtgcttgtagttgatgattcagcttttatgagaaaaatgataagtgattttctgaccgaagaaaagcagatagaagtaatcggaactgcgagaaacggagaagaagcgcttaagaagattgaattattaaaaccggatgttattactcttgatgttgaaatgccggtcatgaatgggacagatacgctccgcaaaattattgagatttataacttgccggtcattatggtgtctagccagaccgagaaaggtaaagaatgcacaattaattgtttggagatcggtgcctttgactttatcacaaagccatcaggctcaatatctctggatctatacaaaattaaagaacaactagttgagcgtgtcgtcgcggcaggactttccggcaagcggaaacgtcctgtttcccagacagttcggcccgaacctattgtgcgtgctgtcgttaagcctgaattaagcaaaccgaaacctggcacgggcagacaaattgtgtgtatcggcacatcaacaggcggtccacgggcgttacaaaaggtgataccgaagctccctaaggatttgaacgcaccagtggttgtcgttcagcacatgcctgaagggtttactgcttctttggctgatcggctgaatcatttatctgacattcaggtaaaagaagcaaaagatggtgaagcagctcttaacggctgtgtttacatagcaccgggcggaaaaaacatatccgttattaaaaacagcgaaggactccaggttgtgcttgataaccatgacacaccaagccgtcataaaccatctgctgattatttattccgttctgtcgggaaactgacagattatgaaaaagtagcggttatcatgaccggaatgggcagtgacggcactgctggactaaaggacatgctaacagccggcaatgtgaaagccattgcggagtctgaagaatcttgtgtcgtatacgggatgccaaaagctgctgttaaagcgggtctcattcatgagattaaacatgtggaagatatcgcagcatccatcacaagctgtgtgaaaaaagagagggtgtgattcaaatggatatgaatcagtatttagatgtctttattgatgagagtaaagaacatttacaaacatgtaatgaaaagcttcttcttttagagaaagacccgactgatcttcagctcgtacatgatatattcagggctgcccatacattaaaaggaatgagcgcaacgatgggctacacggatttagcacatcttacccatctgcttgaaaacgtgctggatgcaatccgaaacggagacatggaagtcacctcagactggctggatattttgtttgaagctctggatcacctggaagcaatggttcagtctattattgatggcggggatggtaaaagagatatctcagaagtgagtgccaagcttgatgtgaatggtgcgcacgctgaatccgctgcctccgctgaacctgcagaagcacagagttcagcatctgattgggaatatgatgaatttgaacgcacagttatacaagaagcggaggagcaaggcttcaaacgatatgaaatcaagatttctctgaacgaaaactgtatgttaaaagcagttcgtgtctatatggtgtttgaaaaactaaatgaagtcggagaagtagccaaaacaattccaagtgctgaagtgcttgaaacagaagattttggaactgactttcaagtttgtttcttaacacatcaatcagcggaagacattgaacaattaatcaatggcgtgtcggaaattgagcatgttgaagtcattcaaggggctcctttaacatcagctgaaaagcctgaagaatctaagcaagaagattcaccagcagcagctgtacctgcgaagcaggagaaacaaaaacagcctgctaaaaacgatgaacaggcgaagcattcagccggcggatctaaaacaattcgtgtcaacattgacaggcttgattctttaatgaacttatttgaagagcttgtcattgaccgcgggcgtctcgagcagattgcgaaagagcttgagcataatgaactgactgaaacggttgaacgaatgacgagaatttccggagatttgcaatcgattattctgaatatgagaatggtcccggttgaaactgtttttaacagattcccgagaatgattcgccagcttcagaaagagctgaataaaaaaattgaactctcgatcatcggtgcggaaactgaactggatcgtacagtaattgatgaaatcggagatccactcgttcacttgatcagaaacagtattgaccatggtatcgaggcgccggaaacacgtttgcaaaagggaaaaccggaatcaggaaaagttgtgcttaaagcttatcacagcggcaaccatgtctttatcgaagtagaggatgacggcgcaggccttaatcgaaaaaaaattctggaaaaagcgcttgagcgcggggtcataacggaaaaagaagctgaaaccttagaagacaaccaaatttacgaattgatttttgctccggggttctcaactgctgaccaaatttctgatatttccggccgcggtgtaggacttgacgttgtaaaaaacaaactggagtctcttggcggttcagtcagtgtgaaatcagccgagggtcaaggctctctattcagcatccagctgccgcttaccttgtctattatttcagttctgctgattaagttggaagaagagacatttgccattccgatttcttcaatcattgagacagcagttattgacagaaaagacattttgcaaacgcatgaccgtgaagtgattgactttagagggcatattgtccctgtcgtttatttaaaagaagagtttaaaatagaagatacaagaaaagatgcggaacagctccatatcattgtcgtgaaaaaaggcgacaaacctactgcatttgtggtggactcctttattggccagcaggaagttgtgctgaaatcactcggagattatttaacaaacgtctttgcaatttccggagctactattttaggagacggagaagtagcgctcattattgattgtaatgcactgattatttaaccattcgaggaggtgtctcacatgactgcagaaattaaaacaggcgaaaaaatgatagtctttatggtaaatggcaaagaatatgccatttccgtcactcaggtgaaatcaattgaaaaatggcaaaagccaacgagggtacctggcgtcgaaccatatatttgcggggtaatcaatttacgcggggtggtgactccggttattgatttaagaaaacgcctgaatttgccagagtatgaaattacagatgaaacacgaattatcattattgcttatcgtgatattgaagtcggctggattgtggatgaagcgaatgatgtgattaccgtacacgaaagtgaaatagaatctgctccagaaggcgttcagaaagatacggatgtgtcgatcgaacagattgtgaaacaagagaacagactcttaaatattattgatgcgaacgcggttttggataaagaatcatctcagtccgctgtgcccgatcaagcttaatcttaaaggggttatgacatgagtatttttaatggaatcaaagaagagcagatggacattttgcgggaagtcggcaatataggcgccggccactccgcctctgcaatggcccagctgttaaatagaaagatagatatggaagtcccatttgcaaagctgctgtcttttgatgagcttgttgattttttcggcggcgccgatgtcccggttgccagcatctttttaagaatggaaggcgatttaacgggttcaatgttctttataatgcctttttttcaggcggagcagtttatcagagagctgattggaaaccccgattttgacatagaggacttaggtgaagaccacatgagctcatccgctttgcatgaactgggcaatattttagcggggtcatatttaacagctttggcggatttgacgaaactccagctctatccaagtgttcctgaagtctctttggacatgttcggagcagtgatcagcgaagggctgatggagctcagtcaggttggagaacacgccattgttgtcgacacgtcaatttttgaccaaagccatcagcaggagctgaaagcgcatatgtttatgctgccggactatgattcatttgaaaagctctttgtcgccttaggtgcatcattatgagtacaactgaggctgttgttataaaggttgggattgctgacgtgaagatcgcccgcttcccggataccatccggacctctggtttgggctcatgtgtggggctggtgctttatgataaagaaaagcaaacggcgggtcttgttcatgtcatgcttccggattcgacgttatcgaaaactgccgagctcaaccgggctaagtacgctgacaccgccgtacagaccacgattgatatgctgatagaagcgggatgccggaaatttgcattaaaagcaaagctggccggcggatcagagatgtttaaatttaaatcgacaaatgatttgatgaagatcggaccgagaaatgtattagcgataaaagaacagctgtctttatttaatattcctattattagtgaagatacgggcggctcaagcggccggacgatagaatttgaaccgaagtcctgcatgctgcatattcgaactgttaaacaaggtgaaaaaacgatttaattaaggtattagggggataacaatgcaatccttgaattatgaagatcaggtgctttggacgcgctggaaagagtggaaagatcctaaagccggtgacgacttaatgcgccgttacatgccgcttgtcacatatcatgtaggcagaatttctgtcggactgccgaaatcagtgcataaagacgatcttatgagccttggtatgcttggtttatatgatgcccttgaaaaatttgaccccagccgggacttaaaatttgatacctacgcctcgtttagaattcgcggcgcaatcatagacgggcttcgtaaagaagattggctgcccagaacctcgcgcgaaaaaacaaaaaaggttgaagcagcaattgaaaagcttgaacagcggtatcttcggaatgtatcgcccgcggaaattgcagaggaactcggaatgacggtacaggatgtcgtgtcaacaatgaatgaaggtttttttgcaaatctgctgtcaattgatgaaaagctccatgatcaagatgatggggaaaacattcaagtcatgatcagagatgacaaaaatgttccgcctgaagaaaagattatgaaggatgaactgattgcacagcttgcggaaaaaattcacgaactctctgaaaaagaacagctggttgtgagtttgttctacaaagaggagttgacactgacagaaatcggacaagtattaaatctttctacgtcccgcatatctcagatccattcaaaggcattatttaaattaaagaatctgctggaaaaagtgatacaataatgaatttcatggttagcgagtgaaaaacatgtcaacactattatggcttttaagctttacgctccacggcgttcttctgtacgctgtcattatcctgtatacgaggctcgctgcagtgaaagaaacagaaaaacagcaaaaacagatacttgaagagacggaaaacaccttggcggcatttctgcttgaattaaaagaagaaaatgagaaactgatagaaaataaagcttcatctgcaagtcaatacgatgaagaatcccaaaagccaggccttcagccctctgaaacatatcaagagcgggatccagtccaagaggcagagaatcttcctgaacatattgaaggtctgattacagaggttgaccgtcgggaagagatcgtaaacagtgaggtccaatcatttgaagaccaggtcatagaattatatgaacagggatattcggcaagtcaaattgcccagaaaatgaagagcggaaagacagaaatcgagctatttttaaaatttcgctccaaaggtgtaaaggattcttgattgtcggataaagctgtgttatattatgtcttggtgttaaatacacacgcttaacgatttatgcagagggtgctgcaggcggcagttctgcacaaaaatgacctaagcggaggaaaaaaaccattatattaggaggaaataacatgtcagtcatttctatgaagcaattgcttgaagctggtgttcacttcggtcaccaaacacgccgttggaacccaaaaatgaagcgttacattttcacggagcgtaacggaatctacatcattgaccttcaaaaaacagtcaaaaaagtagaggaagcttacaacttcactaaaaatcttgctgctgaaggcggaaaaatccttttcgtcggaacaaaaaaacaagctcaagattctgttaaagaagaagctcaacgctctggcatgtactatgtcaaccaacgctggttgggcggtacattaacaaactttgaaacaatccaaaaacgtattaaacgtcttaaagacattgaaaaaatgcaagaaaacggtacgtttgatgtacttcctaaaaaagaagtcgttcaattgaaaaaagaattagagcgtcttgaaaaattcctaggcggaattaaagatatgaaggatcttcctgatgcattattcatcatcgatcctcgcaaagagcgcatcgctgttgcggaagctcgcaaattaaacatccctatcatcggtatcgtagatactaactgtgatccagatgaaatcgatgttgttatcccagcgaacgatgacgctatccgcgctgttaaacttctaacttctaaaatggcagatgcaatcttagaagcgaagcaaggcgaagaagaagcggaagttgctgaagaaactgcaccagaaacagaaacaacaactgcgtaacctattcaaaaggtgataagagggactgccttttatcaccttttttcaagaaaaatgtgtaatatacatactcttgtttaaacatataaggaggaatacaaatggcaattactgcacagcaagtaaaagaactgcgtgaaaaaactggcgcgggcatgatggattgtaaaaaagcgttaactgaaactgacggagatatggacaaagcaattgaccttttaagagaaaaaggaattgcaaaagcagcgaaaaaagctgaccgtatcgcagcagaaggttctactcttattaaaactgacggcaacaaaggcgttatcctagaagtaaactctgaaactgatttcgttgcgaaaaacgaaggttttaaagagcttcttaacactttagctgaccaccttcttgcaaacacgccagctgatgttgaagaagcaatgggccaaaaaatggaaaatggctcaactgttgaagagtacatcacaagcgcagttgctaaaatcggtgagaaaatcactcttcgccgctttacagttcttacaaaagacgacagctctgcattcggtgcgtaccttcacatgggcggccgcatcggtgtattaactgttctcaacggtacaactgatgaagaaactgcgaaagatatcgcaatgcacgttgctgcagttaaccctcgttacatttctcgtgatcaagtatctgaagaagaaacaaatcatgagcgtcaaatcttaactcagcaagccctccaagaaggcaaacctgaaaacatcgtagcgaaaatggttgaaggccgtctgaacaaattcttcgaagaaatttgtctattagaccaagcgttcgttaaaaacccagatgaaaaagtgaaacaagttattgcagcgaaaaacgctactgttcaaacttttgtccgctatgaagttggagaaggcatcgaaaaacgtcaagaaaactttgctgaagaagtaatgaaccaagtgaaaaaataatggtgaaaagatttcgcggctaagtcgcgtcttttcaggcagtataggggacacattttgtgttccctatttttaaaactatatttacaaacctttttttctcttgcataatagaaaacggcaatgtttacacttggaggttatcatggaaaaaccaaaatacaaacgtatcgtattaaagcttagcggggaagcattggcaggagaacagggaaatggaattaacccgactgtcattcaatccattgcaaagcaagtgaaggaaatcgctgagcttgaagtcgaagtggctgttgttgtaggcggcggcaacttatggcgcggaaaaacaggaagtgacctgggcatggaccgcgcgactgctgactatatgggaatgctggcgacagtaatgaattcgcttgctcttcaagacagcttggaaacactcggaatccagtccagagtgcaaacatccattgaaatgagacaagttgctgaaccgtacataagaagaaaagcgatacgccacttagagaaaaaacgtgtcgttattttcgctgcgggcacaggaaacccatatttctcaactgatacgacagctgcactgcgggctgctgaaattgaggcagacgttattttaatggctaaaaataacgttgacggtgtgtataatgctgatcctagaaaagatgaatcagctgttaagtatgaatcactttcttatcttgacgttcttaaagacggcctggaagtcatggattcaacagcttcctctttatgcatggacaatgacattccgcttatcgtcttttctattatggaagaaggaaatatcaaacgtgccgttatcggtgaatcaatcggaacgatcgtgagggggaaataacgtgtcaaaagaagtattaactcaaacaaaagaaaaaatggaaaaagcaattgctgcttatcagcgcgaattggctactgtacgcgcaggccgtgcaaatccatcattattagataaagtaacggttgaatattacggagcgcagacacctttaaatcagttgtcttctattaacgtgcctgaagctcgtatgctcgttatcacaccatacgataaaacagcaatcggcgatatcgaaaaagcgattttaaaagctgatttaggtcttacaccaacaagtgacggcaatatgattcgaattgcaattccggcactaacagaagagagacggaaagaattagtgaaagttgtaaaaaaatatgctgaagaagcaaaagtagctgttcgtaacgttcgccgtgatgctaacgatgatctcaaaaaacttgagaaaaacggagacattactgaggatgaactgcgtgcttccactgaagacgttcaaaaactgacagatgaatatgtgtcaaaaattgacagtgtcacaaaagacaaagaaaaagaaatcatggaagtttaatgaaaaactatgtacaatagataatagtgaaaagaccctctcatgtttacagggggtttttttgttaatactgttgattacattgattatcagcagggaatgtaacctttttgggtgacggaggaatctcatgctcaacatactcaaaaattggaagaatcagcaaactgcggcttccaacttagaacgttatacaaaagaagacatacttaagggagaaattcccgaacacatcgccattatcatggatggaaatggccgttgggctaaaaaacgctctcttcccagaattgcaggccaccatgaagggatgaaggtggtaaaaaggaccacgaagctcgcaaacgaattaggtgtcaaagtactgacattgtatgcattttcaacagaaaactggaaaagaccgaaaatggaggtcgattttttaatgaagcttccggaagaatttttgaatacgtatcttccagagcttgttgaggaaaatgtacaggttcggatcattggggatgaaacggctttgccggcgcacacattacgtgcgattgaaaaagctgtacaggacacggcgcaaaacgacggaatgatccttaattttgctcttaactatggaggccgtactgaaattgtcagtgctgcaaaatcactcgcggaaaaagtgaaggaaggctctttgaatattgaagacattgatgaatcgcttttttctacttatttgatgactgaatctttgcaggatcctgaacttttaattcgaacgagcggcgagataaggctgagtaattttatgctatggcaggttgcctacagtgaatttgtctttactgacgtcttgtggcctgactttaaagaagatcacttcttgcaggcgttaggagagtttcagcagagaggccggaggtttggcggaatttagaggatggtggacatgaaacaaagaattttgacaggtgttctggcagcaattgtatttttatttttggttattgtcgggaaattgccgttcaccatattaatttatgctatgagcagtgtggcgctttttgaacttttacggatgaaaaagctgaagctggtttcactgcctggtttgatcggtcttttattattgtggatgttcttattgccaagccagtattcgttttttgaagcggacgggatttccaaaatggaaatagctttatttgcggtactgctattgctgacttacacagtgttggtcaagaacacctttacttttgatgaagtcgggtttattacgcttgcagcaatttacatcggaatgtgttttcattattttatcgaaatcagaaatcttgaccaatacggattaacatacattttttatgcgtgtgttgtcatttggtccaccgattccggtgcctattttgtcggtaaatcgcttgggaagcggaaactgtggcctgaaatcagtccgaataaaacagtggaagggtttgcaggcggaattgtcatcgcacttgtattggcgacgatttttcagcttgttgcacaacttccgatcccgtatatctatctgctgttgatcacgctgtttttgtctgtttttggacaactgggagatttagtggaatccgccttgaaaagacattacgatgtaaaggattctgggaatattcttcccgggcatggcggtatattagaccgttttgacagtttcttgtttgtcatgcctttcttgtactttctgcttgcccttttttcataaaaaagtctaatatgaatatgagactgatcatgcagcaataagaataggagtagtggcaactttgaaaaatatttgtcttttaggagcaacaggatcaatcggcgaacagactcttgatgtactgcgtgcacatcaagaccaatttcagctggtatctatgtcgtttggcagaaatattgataaggccgttccaatgattgaggtctttcagccgaagtttgtctctgtcggtgatctggatacatatcataaattaaaacaaatgtctttttcttttgaatgccaaatcgggctgggagaagaaggactgatagaagcagcagtgatggaggaggttgacattgttgtcaacgctttgcttggaagcgtcggtcttatcccgacattaaaggcaattgaacagaaaaaaacaattgcgcttgcaaataaggaaactcttgtcactgcagggcatatagtaaaagaacatgctaagaaatatgatgttccgctgctgcctgttgacagtgagcattcagccatttttcaagctcttcaaggcgaacaggctaaaaacattgaacgcctcatcattacggcatccggcggaagttttcgggacaagacgcgggaggagctcgaatcagtaacagttgaagatgcattaaaacatccaaactggtcaatgggtgcaaaaattacaattgattcggctacaatgatgaataagggattagaggtgatcgaggcacactggcttttcgatataccttatgaacaaattgatgtggttttacataaggagagcatcatccattcaatggttgagttccatgataaaagtgtgatcgcacagctcggaactccggatatgagagtccccattcaatatgcgctcacttatcctgaccgattgccattaccagatgcgaaaaggcttgaattatgggaaatcggcagccttcattttgagaaagctgattttgacaggttccgatgcttacaatttgcttttgaatcaggtaaaataggaggaacaatgccgacagtgctaaatgcggcaaacgaagtagctgtcgctgcctttttagctggcaagataccgtttttggctattgaagactgtatcgaaaaggcactaacccgccatcaattactgaaaaaaccgagcctggcggacattcaagaagtggacaaagatacccggggatacgtcaattcaatactcacataaggtggtatgttcgtgaatacagttatagcgtttatcattattttcggaacgctcgttttcttccatgaactgggccatttattgctagcccaaagagcgggaattctctgccgtgaatttgcgatcggcttcggtccaaagattttttctttcaaaaaaaatgaaacagtttatacgatcaggctgcttccggtcggcggatttgttcgtatggccggcgaagatccggaaatgattgaggtgaaacccggatacacggtcgggcttctgtttaataaagaagatcaagttgagaaagtcatcatcaatcaaaaggaaaaatatccggatgctttagtcattgaagtggaaacagcggatctagagcatgacatgaagatcactggttatgaacaggggaaagaggacgaactttccagctttactgtcagcgaaacatccttttttattgtagacggagaagaagtgcagattgcgccgtataatcgccaatttggttccaaacctgtatggcagcggattaaagcaattgctgcagggccgattatgaactttattttagcttacgtcattttagtgatgcttgggctgattcaaggcgtaccgtcaaatgaacctatgctcgggcagctgacagacaatggacgggcggctgaagcagggctaaaagaaggggattatatccaaagcattaacggagagaaaatgaggtcttggactgacattgtctccgctgtaaaagaaaacccggagaaagaaatggacgttgcagtaaaaagagataacaaaacgcttcatatttcggtgactccggaagctgttaaagatgagaacaaaaaaacaatcggacgtttcggttcctatgcgccgactgaaaaaggcgtactctcagcggttgcttacggcgcgacatcaacagttgatgtcaccaaagccattttaaccaatctgagcaaattagtaacaggccaatttaaactcgatatgctgtcaggtcctgtcggcatatatgacatgacagaccaagtggcgaaaacagggatcgtgaacttatttcagtttgcggcgtttttaagcattaaccttgggattgtcaacctgcttccgattccggcacttgacggaggaagactgttgtttctatttattgaagcgattcggggcaaaccgattaacagggaaaaagaagcatttgttgtgtttatcggagtagctttcttaatgcttcttatgctggttgtcacatggaacgatatccagcggctgtttttgtaaacgaaaagtaaatcaatcagaggtgcgaagaaatgagacaaagcttgacgcttattcctacgctccgtgaagttccagctgatgccgaagcaaaaagtcatcagcttcttctgagagcaggatttatcagacagaatacgagcggggtatacagctatatgcctcttgcgtataaggtgattcaaaacattcagcagattgttcgagaggaaatggagaaaattgatgccgtagaaatgctcatgcccgcattgcagcaggcagagacatggcaggaatcaggcagatggtatacgtatggtcccgaactgatgagactaaaagaccgtcatggccgtgaatttgctttaggggcaacgcatgaagaggttatcacttcgcttgttcgcgatgaggttaaatcttataagcgtctccctctgactctttatcaaattcagtctaagttcagagatgaaaaacgtcctcgcttcggtttgttaagaggccgcgaatttattatgaaggatgcgtactctttccatgcatctgcagagagcctggatgaaacgtatcaaaaaatgtacgaggcctattctaatatttttgcccgctgcggcattaatgtaagacctgttatcgctgattcaggcgcaatgggaggaaaggatacgcacgaatttatggcactttctgcgatcggagaggatacgattgcgtattctgatgaatcacagtacgcggctaatatcgagatggctgaagttcttcaccaggaagttccttcagatgaagagcctaaagctctagagaaggttcatacgcctaacgtgaaaacaatcgaagaactgactgcgttcttacaggtttcggctgaagcgtgcattaagtcagtattgtttaaagctgatgaccgttttgtcttagtgcttgtaagaggggatcatgaagttaacgatattaaagtgaaaaacttgcttcatgcagaagttgtagagcttgctacacatgaagaggtcattcagcagctcggaacagagccaggctttgtaggccctgtcggtattcatcaggatgtggaagtatatgccgatcaagctgtgaaagcaatggttaatgctgttgccggggcaaatgaaggagatcatcattataaaaatgtcaatgtgaatcgtgacgcgcaaattaaagaatttgctgatcttcgttttattaaagaaggtgatccttcaccagacggcaagggaacgatccgttttgctgagggaatcgaagtcggacaagtctttaagctcggaacacgctattcagaagcgatgaatgcgacatatttagatgaaaacggacgcgcgcagccaatgctgatgggctgttacggaatcggtgtgtcaagaacgctttctgctattgctgaacagcatcacgacgaaaaaggcttaatatggccaaaaagcgttgcgccgtacgatcttcatattcttgctttgaacatgaaaaacgatgggcaaagagagcttgctgaaaagctgtatgccgatttaaaagcggaaggctatgaagtgctctatgatgaccgtgctgagcgtgccggcgtaaaattcgctgattcagatttaatcggccttccaatccgcatcactgtcggaaaacgagctgacgaaggaatcgtcgaagtgaaaattcgtcaaactggtgagtcaactgagatttcagtagacgaattatctgcgtttatcagcaagcagtaatcaccataacgatttatcaaaaaacatgttaaaatagaaataatagaaggtacctcattgcctgaggtaccttcacttatgatgtttttagggagggatactgtcttaatggaacagttatcagtaaacagaaggcagtttcaaattcttctgcagcagattaatatgacagatgataccttcatgacatactttgaacatggcgagattaaaaagctgacaattcacaaagcttctaagtcttggcattttcattttcaatttaaatctttgctgccttttcaaatatatgacacattaacaacgaggctgacgcaatcgtttgcccacatagcaaaagtgacatcttcaattgaagttcaggatgccgaggtcagtgaaagtatcgttcaagactactggtcacgctgcattgaagaactgcagggcatttcgccgccgattatcagtcttttaaaccagcaaaaaccgaagctgaagggcaataaactgattgtcaaaaccaaaacggatacagaagcggctgcgctaaaaaacaaatacagttccatgattcaagcaggctaccgtcaatttggctttccggatcttcagcttgatgctgaaatatttgtatccgagcaggaagttcaaaagtttcgggaacaaaagcttgcggaagaccaagagcgggcgatgcaggccttgattgaaatggagaagaaagataaagaaagtgatgaagaccaagcaccatctggtcctcttgttatcggttatcaaattaaagataacgaggaaatccggacacttgacagcatcatggacgaagaacggagaattacggtccaaggttatgtgtttgatgtggagacgcgcgagctgaagagcgggcgcacgctgtgtatcttcaaaattacagactatacaaatagtattttgatcaaaatgtttgcacgtgaaaaagaagatgcggcactgatgaagtctctgaaaaaaggaatgtgggtaaaagcacgcggaagcattcaaaatgatacatttgtcagagaccttgtcatgatcgcaaatgacgtaaacgaaataaaagcaaaaacccgtgaagattcagcacctgaaggagaaaaaagagtggaattgcatcttcattccccaatgagccaaatggatgctgttacgggtatcggaaagcttgtcgaacaggcgaaaaaatgggggcatgaggccatcgctttgactgaccatgctgtcgttcaatcctttcctgatgcgtattctgcggcaaaaaagcatggaattaaaatgatttacgggatggaagcgaatctcgtggatgatggcgtgccaattgcttataatgccgcacatcgtctgctcgaagaagaaacatatgttgtttttgacgttgagacgacaggattgtctgctgtatacgataccattattgagctggctgcagtaaaagtaaaaggcggagaaattattgataaatttgaggcgtttgcgaacccgcatcgtccgctttccgccacaatcatagagctgacagggatcactgatgatatgctacaagacgctccggatgtcgtagatgtaataagagatttcagagaatggattggcgatgatatccttgtcgctcataatgcaagctttgatatgggattcttaaatgtagcctataaaaagcttcttgaagtcgataaagctaaaaacccagtcattgatacgcttgaacttggacgttttctctatccggaatttaagaaccaccggttgaacacactttgtaaaaagtttgatatcgaactcacacagcatcaccgtgcgatctatgatactgaggcaaccgcttatttgcttctgaaaatgctgaaagacgcagctgaaaaaggcattcagtaccatgatgagttgaatgaaaatatgggtcagtccaatgcttatcaaagatcaagaccgtatcatgcaacattacttgccgtgaacagcacgggacttaaaaatttatttaagcttgtgtcactttctcatattcattatttttacagagtgccgcgtattccgagatctcagcttgagaaatacagggaagggctgctgatcggttctgcctgtgacaggggagaggtttttgagggaatgatgcaaaaatcgcctgaagaggtggaagatatcgcgtcattctatgattaccttgaggttcagccgcctgaagtgtatcgtcacttgctggagcttgaactggtccgtgatgaaaaagcgctgaaagaaattattgcgaatatcacgaagctgggggaaaagcttaataaaccggttgttgctacgggaaatgttcattacttgaatgatgaggataaaatctacagaaagattttaatatcctcacaaggcggggcaaatccgctgaataggcatgaactgccgaaagtgcatttcagaacgacagacgaaatgcttgaagctttttctttcttaggtgaagaaaaagcgaaggagatcgtagtcaccaatacccaaaaggttgcttctttagttgatgacatcaagccgattaaagatgatttatatacgccgaaaatcgaaggcgccgatgaagagatcagagaaatgagctatcagcgtgcaagaagcatttacggggaagagctgcctgaaattgtcgaagcgcggattgaaaaagagttaaagagtattattggccacggatttgctgttatttacttgatctctcacaaacttgtaaaacgttcactagatgacgggtatctcgttggttcccgtggttccgtaggatcttcattagttgcgacacttactgagattactgaggtaaacccgctgccgccgcactatgtttgtcctgagtgtcagcattctgagttctttaatgacggttctgtcggttctggttttgacctgcctgacaagacatgtcctcattgcggaacgcctttgaaaaaagacggccatgatattccatttgaaacgttcttaggatttaaaggggacaaagtacctgatatcgatttgaacttctcaggggaatatcagccgcaagcacacaattacacaaaagtattgttcggagaagacaatgtatatcgtgcgggaacaataggcacggtggcagaaaaaacagcctacggttatgtaaaaggctatgccggagacaacaatcttcatatgcgcggtgccgaaatagatcggctcgtacagggatgcacaggtgtaaaacgtacaactggacaacaccctggcggtattatcgtagttccggattatatggatatttatgatttttcaccgatccagttcccggcagatgccacaggttcagagtggaaaacgactcattttgatttccactccatccatgacaacctgttaaaacttgatattctcggacacgatgacccgactgttattcggatgcttcaagacttaagcggaatagatccgaaaacaattccgacggatgatcctgaagtgatgaagatcttccagggaaccgaatcactcggtgtgactgaagaacagattggctgtaaaacgggcactcttggaattcctgaattcggaacccgatttgtccggcagatgcttgaagatacaaagccgaccactttttctgagctcgttcagatttcaggcttgtctcacggaactgatgtatggcttggcaatgcacaggagctcatccacaataatatttgtgagctgagtgaggttatcggctgccgtgatgacattatggtttatttaatctatcaaggccttgaaccgtcccttgcctttaaaatcatggaattcgtgcgtaaaggaaaaggattaacgcctgaatgggaagaagaaatgaaaaataacaatgtcccagactggtatattgattcctgtaaaaagattaaatacatgttcccgaaagcccacgccgcggcatatgtcttaatggcagtccgcattgcttactttaaagtgcatcatgctcttttgtattatgcggcttattttaccgttcgtgcagatgactttgatatcgatacaatgatcaagggctctacagcaatcagagcggtaatggaggatataaactctaaaggacttgatgcttcaccgaaggaaaagaaccttctgactgttttagaattagcgcttgagatgtgtgagagaggctattcattccaaaaagtcgatttatatcgctccagcgccacagagtttattattgacggcaacagtctaattccgccgtttaactctattccagggttagggacgaacgctgctttgaacattgtaaaagctcgcgaagaaggcgaattcctctcaaaagaagatttgcaaaagagagggaaagtatcaaaaacgattttagagtacttagatcgccacggctgtctggaatcactgcctgatcaaaaccaattgtcactgttctaatatggaatgcagaatttctcagaaattctgcttctatgcatacataagcgcaaaaagtgccatcgtaatattagagtttctgtcacttgcttaggtatgaaggtaagcgtatatccatttgcaataaaaatatggttatggtatagttttattggaaatgctaacgattaccgaggcaaagagtggggaaacccgctcttttgtattgaacaggagaattttgtctcgacatgttcatcgtttactttttagcccctgctcttttgaagcagggtttttatgcagagtgacgagacgaatatgagatcgacagcacaaggaggaagaacatgagcaaaaaagtgactgacaccgttcaagaaatggctcagccaatcgtagacagccttcagctggaactcgttgacattgaatttgtcaaagagggccaaagctggttccttcgcgtgtttattgattccgatgacggtgtggatattgaggaatgtgccaaagtaagcgaagctttaagcgaaaagcttgatgaggcagacccaatcagccaaaattactttcttgaagtctcatctccaggagctgagcgtccgctaaagaaaaaagccgatttcgaaaaatcactaggaaaaaacgtatacattaagacgtatgagcctattgacggcgtaaaagtgtttgaaggtgaactggctgaatttgatggacaaacagtgacagttgagatcacgatcaaaacaagaaagaaacggatcaatattccgtatgaaaagatagctaatgcaagattagctgttacattctaatgaatacaaatgttttaaggggggagaccgttaaatgagcagtgaattattagatgctctcacgattcttgaaaaagaaaaaggcatcagtaaagaaattatcatcgaagcaatcgaagctgcgttaatttctgcttataagcggaattttaatcaagcgcaaaatgtacgggtggatctaaaccgtgaaactggctccatccgtgtatttgcaagaaaagatgtcgttgacgaagtatacgaccagagattagagatctcaattgaagaggcacagggcatccatccggaatatatggtcggcgatgtcgtcgaaatcgaagttacacctaaggatttcgggcgcatagctgctcaaacagcgaagcaggtcgtcacacagcgtgtgcgcgaagctgagcgcggcgtgatctattctgaatttatcgaccgtgaagaagacatcatgacagggatcgtccagcgtctggacaataaatttatctacgtgtctttaggcaaaatagaagccttgctgccggttaatgagcaaatgccgaatgaaagctacaagccccatgaccgcattaaggtatatatcacaaaagtagaaaaaacaacgaagggcccgcagatttatgtgtcaagaacacatccaggcctgttaaagcgtttgtttgaaattgaagtgcctgaaatttatgatggaactgtcgagctaaaatctgttgccagagaagccggcgaccgttcaaaaatttctgttcgcacagatgatcctgacgtggatcctgtcggttcatgcgtagggcctaaaggccagcgtgtgcaagcaatcgtcaatgaattaaaaggtgaaaaaattgatattgtcaactggtccagtgatcctgtagaatttgtcgcgaatgcgctcagcccttccaaagtgcttgatgtcatcgttaatgaagaagaaaaagcgacaactgttattgttcctgattaccagctgtctctggcaattggcaaaagaggacaaaacgcacgcttagctgctaaactgacaggctggaagattgatattaagagcgaaacggacgcaagagaacttggaatctatccgagagaacttgaagaagatgatgagccgctctttacggagcctgaaactgctgaatcggatgaataagaggtgactttaggtgaataaacacaaaaagatcccattacgcaaatgtgtagtgactggtgaaatgaagcctaaaaaggaactgatccgagttgtacggtcgaaagaaggcgaaatctcagtagacccgaccggaaaaaagaatgggcggggtgcttatttaacgctggataaagagtgcatcttagcagcaaaaaagaaaaacactttgcaaaatcaatttcaatcacaaatcgatgaccagattttcgatgaattgctggaactggcggaaaaggtgaaaaaataaaatgtctggaatggaatggtttcccttgctgggtctggccaatcgagctcgtaaggtcgtgtcaggcgaagacttggtaataaaagaaatcaggaatgcgcgtgcaaagcttgtcctgcttacagaggatgcatcatctaacacagcaaaaaaagtaactgacaagtgcaattattataaagtcccttataaaaaagtcgagagtcgcgcggttcttggacgctctatcggtaaagaagcccgtgtcgttgtcgccgtcactgaccaaggttttgcgaataagctgatcagcttgctcgattaatatttttgggggtgaacgaatggctaaaatgagagtatacgaatatgcaaaagcgttaaatgtttcaagtaaggaaattttgaccgcactgaagaacatggatttagaagtgaataatcacatggccatgcttgaagaaaaggccattaaaaagctagatgccaaatataaaaaaggcggcgcagctgctaaatctcaaaagccagcagaaacgaacaaaaacaaacagccacaaggggttaatcagcaatcagctggaaatcaaccaaataaaattcgagacggaaagaagaatgacgtgcagaataatcaatttaacaaaaacaagaagaataacaacaacaaaaaaaataaacgcaacaacaacaataataaaaaccaacatcagcaaaagcctgtaaagccgaaaaaagagcttcctgagaaaattacattctctggcactttaacagttggcgcacttgctgaagagcttggcaaagagccttcagaactcattaaaaagctgatgcttcttggcgtaatggctaccattaaccaagagcttgataaagacacaatcgaactcattgcatcagaatatggtgttgaaacagaagaggtcattgtgcttgaagaaacagagctggaaaaatacgaagagcctgataatgaagaggatcttgaaattcgtcctcctgtcgtgacaatcatgggccacgttgaccatgggaaaacaacgcttcttgacagcatccgtaaaacaaaggttgttgaaggagaagcaggcggaatcactcagcatatcggcgcttatcaaattgaagagaacggcaagaaaatcacgttcttggatacaccgggccacgccgcatttacaacaatgcgtgcacgcggtgcagaagtaactgatattacgattcttgtcgtagctgccgatgacggtgtcatgccgcaaacagttgaagcgattaaccatgcaaaagcagcagaggttccaatcatcgtagctgtgaataaaatagataaagaatccgcaaaccctgaccgtgtgatgcaagaactgacggaatacggtcttgtccctgaagcatggggcggagaaaccatttttgtgccgctttccgctttaactggaaaaggcattgatgagctcgttgaaatgattttgcttgtcagtgaggtagaggaactgaaagcgaatccgaaccgtcaggcaaaaggaacggttattgaagctgaactcgataaaggcagagggtcagttgcgacgttgctcgtacagactggaacactgcatgtcggtgatccgatcgtagtcggcaatacatttggccgtgtccgtgcaatggtcaacgacattggccgccgtgtgaaaactgccggcccgtcaactccggttgaaattaccggtttgaatgatgtccctcaagcgggagaccaattccttgtctttaaggatgaaaaaacagctcgttctgtcggtgaagcccgtgcttcaaaacagcttgaagagcagcgcagcgataaagcgaagctcagtcttgatgatttattcgagcaaattaagcaaggtgatgtaaaagacatcaacctcatcgtaaaagctgacgttcaaggatctgctgaagctttaacggctgcgcttcaaaaaattgaagtagaaggcgttaaagtgaaaatcatccatacaggcgttggtgcgattactgaatctgacattatcttggcatctgcttccaatgcaattgttatcgggtttaatgtgagaccggacggaaatgctaagagtacggctgaagctgaaaatgtagatattcgacttcaccgtatcatttacaaagtaatcgacgagattgaagctgccatgaaaggtatgcttgatcctgaatatgaagaaaaagtaattggtcaagtagaagtacgccaaacattcaaagtatctaaaatcggtacaattgccggcggatatgttactgaaggaaccattacgcgcgacagcggcctccgtttaattcgtgacggcgtcgtcatctttgagggcgaagtagatgttctgaaacgctttaaagacgatgtgaaagaagtttcacaaggctatgaatgtggtattacaattaagaaatacaatgacattcgtgaaggtgacatccttgaagcgtttgtcatgcaagaaattgaaagaacgtgatcggatttgcggagtgtgaatgcatcatttatgatgcaggatcgctaaaagaaaagcgtgccgttctgaagcgggttttaactagggttcaaaacaagttcaatgtttcgatttcggagattggctatcaggacacctggcaaagaaccagcttcggaatcgccgctgtttcttcctctcgcgttcaaacagaaaaagaactgcagcgcgtcctagcgtttatcgattcttttcctgaaattgaacggacgatcactaggacagagtggttttaacttagaggtgattgaattgagtatgagagcaaaccgtgtcggcgagcaaatgaaaaaagaactcggtgatattatcagccgcaagctgaaagacccgagaattggttttctgacagtaacggatgtacgtgtatcaggtgatttgcaaattgcaaaggtgtatatctcggttctcggtgacgagaaaaaacgggaggaagcgctgaaagggctggcaaaagcgaaaggatttatccgatccgaaatcggcagccgcatcagacttcgaaaaacgcctgaaattgaatttgagttcgatgaatcaatcgattacggaaatcggatcgaaacactgattcacgaattacattcagagaaaccatctgaataaaaaaagagaggataggcgtatatcgtctgtcctctttcttcgtttataagaaaaaaactcaaaagaaggagtgaaaggcaaatggttaacggagttctccttttacataaacctgttggcatgacatcgcacgactgtgtcatgaagatccgaaagctgttaaaaacaaaaaaagtaggacatacaggaacgctcgatccggaagtatcaggcgtgcttccgatttgtgtaggaagagcgacaaaaatagtcgaatacttaactgaaaaatctaaaacgtatgatgcagaaataacattgggcttttcaaccacaacagaggatcaaaccggagaaacggtggaaacaaagcctgtcaatcacgacattgataaagcggatgtagaaaaggttttaaacagtttaaaggggaaacaagaacaaattccgcccatgtattccgctgtaaaagtaaacggcaaaaaattatacgaatacgcaagagcagggattgaagtagaacgtccgaaacgtatgataaccattgaagacattgccctgacaacagagattaaacatcatggagaaaccgcaagcttccggtttacagtgacttgctccaaagggacctatgtaaggacgctggcggtcatgatcggagaaaagctcggatatccggcccatatgtctcatttaatccgtacggcatccggagatttttctctcgacgaatgctttacttttgatgaactcgaagcacaggcccaatccggaaccgtggaagagcatacagttcctattgaacgtgcgctcaatcatttgccgaaatggatcataagtgatacattagctaagaaagtagaaaatggggctttgcttgagacgcccgagcagttttctgaaatgacaagtgaagaccgtattgccgtctttactgaatccggaacctgcttggcgatctatttccctcatcctgcaaaaaaagggctgttaaagccggcaaaagtattgatgcaaaaaagcgaacaatagaaaaaaggtgaccgttctgtgaagacgatacatattacacatcctcatcatttaataaaagaggagcaggcaaaatcagtgatggcgttaggttattttgacggcgttcatctcgggcatcaaaaggtaatcggcacagcgaagcaaatagccgaagaaaaaggtctgacattagctgtgatgacctttcatccccatccttctcacgtgttgggcagagataaggaaccaaaggatctgattacgcctcttgaagacaaaataaaccaaattgaacaattaggcacagaagttctgtatgtcgttaaatttaatgaagtgtttgcttctctttctcctaagcagtttatagaccagtatattatcggccttaatgtgcagcacgcagtggcaggctttgactttacgtacggcaaatacggcaagggaacaatgaagaccatgccggatgatttagacggaaaagctgggtgcacaatggtagaaaaattaacggagcaggataaaaaaatcagttcttcgtatatccgtaccgcgcttcaaaacggagatattgaattggcgaatgtcttgcttggacaaccttattttattaaaggaattgtcattcatggtgataaaagagggcggaccatcgggtttccgacagcgaatgtcggtttaaataacagctatatcgttccgcccacaggtgtatatgccgtaaaagcggaagtgaacggcgaagtttacaatggcgtttgcaatattggctataagccaacgttttatgaaaagcgccctgaacagccttccatcgaggtcaatctgtttgatttcgatcaagaggtatatggagccgctataaaaatcgaatggtacaaacggattcggagcgagcggaaattcaatggcatcaaagaattaacagagcaaattgagaaagataagcaggaagccatccgttatttcagcaatttgcggaaataacttgcaacgcacgcaaattttattctaaaatatttgcatataggcacgatttttagtatgatagttttcgtagtcttaaaaccattgcttggcaatccgaagtcaccgacggttgctaggtaactggggctaaatatgatttggaggtgaaacaggatggcaattactcaagagcgtaaaaaccaactcatcaatgagttcaaaacacacgaatctgatactggatctccagaagttcagatcgctatcctaactgactcaattaacaacttgaacgagcatttacgtactcacaagaaagaccaccactcacgtcgcggtcttcttaaaatggtaggtaagcgtcgtaatcttcttacgtatctgcgtaataaagacgtaactcgttaccgtgagttaattaacaaactaggcttacgtcgataatcgtaaaaagcgggaggattcccgcttttttatcgtattaaagcgaaatttcttataacaaatcattgaaatccttttacatactactttgacattgatatgttcaattcatttcgttcataataggagtaattgattatttcacacaacgaagagaggagttcgtaattgtatgggacaagaaaaacatgtctttaccatagattgggccggaagaacgcttaccgttgaaaccggccagcttgccaaacaggcaaatggtgctgtgatgatccgctacggtgatacagcagtacttagtacagcaaccgcttcaaaagaacctaaaccgcttgatttcttccctcttactgtaaactatgaagaaagattatatgcggtagggaaaattccgggcggatttattaaaagagaaggacgtccaagtgaaaaagcggttcttgccagccgtttaattgaccgtccgatccgtcctttgtttgccgatggattccgtaatgaagttcaagtcatcagcattgtcatgagtgttgaccaaaactgctcttcagaaatggctgccatgttcggttcatctcttgcactttctgtatcggatattccgtttgaaggaccgattgcaggggttactgtcggacgcattgatgatcaatttatcattaacccgacagtcgatcagcttgaaaaaagcgatatcaatcttgtcgttgccggcacgaaagatgcgattaacatggtagaagcgggagcggacgaagttcctgaggaaatcatgcttgaggccattatgttcggccatgaagagattaaacgcctgattgcattccaagaagaaattgttgcagcagtcggcaaagagaaatctgaaattaagctctttgaaattgatgaagagcttaatgaaaaagtaaaagctttggcagaagaggatctgctgaaagccatccaagttcatgaaaagcatgcccgtgaagatgccattaacgaagtgaagaacgcagttgtggcaaaattcgaggatgaagaacatgatgaagacacaatcaagcaagtgaagcagattttatccaagcttgtgaaaaatgaagttcgccgcctgattactgaagagaaagtaagaccggacggccgcggtgtcgatcaaatccgtccgctctcttcagaggttggcctcttgccaagaacgcacggttcaggtctatttacaaggggacaaactcaggccctcagcgtatgtacgctaggtgctctgggagatgtgcaaatccttgacggcttaggtgtcgaagagtcgaaacggtttatgcatcattacaacttcccgcaattcagcgttggggaaacaggaccgatgcgcggaccgggacgtcgtgaaatcggacacggagcactgggtgagcgtgcgcttgagccagttattccgtctgaaaaagacttcccttatactgtccgtcttgtttcagaagtgcttgaatcaaacggttctacatctcaagcaagcatttgcgcaagcacacttgcaatgatggatgccggtgtaccgattaaagcgccagttgctggtattgcgatgggtcttgtcaaatcaggcgaacattacactgtcttgactgacatccaaggcatggaagacgcgctcggagatatggactttaaagtagcgggaactgaaaaaggcgtaacggccctgcaaatggacattaaaattgaaggcctttccagagagattcttgaagaagcgcttcagcaggcgaaaaagggcagaatggaaatcctcaacagcatgcttgcaacattaagcgaatcaagaaaagagctttctcgatatgcgcctaagatcttaacaatgaccattaatcctgataaaatccgcgatgtcatcggaccaagcgggaaacaaatcaataagatcatcgaagaaaccggtgttaaaattgatattgagcaggacggcacaatctttatttcctctacagatgaaagcggcaaccaaaaagcgaaaaaaatcatcgaagaccttgtgagagaggttgaagtcggccaactttacctaggtaaagtgaaacggattgaaaaattcggggctttcgttgaaattttcagcggaaaagacggtttggtgcacatttcagagcttgcgcttgaacgcgtagggaaagttgaagatgttgtgaaaatcggagacgagattcttgtcaaagtcactgaaattgataaacaaggacgagtgaatttatcccgcaaagcggtgctccgtgaagagaaagaaaaagaagaacaacaatcttaaatgaaaacataaaaggagcctgggagacccggcttctttattttgaagcttttcaaaagcaggcgggttctaccttgtccctctccttcataatgtgagatgaggggggacagaacatgtacaaaaaatttgtaccgtttgccgtttttttatttcttttttttgtctcatttgagatgatggaaaatccgcatgcacttgattatataggggcaatgaaaaaagatacggtgactgtcacggcgtcaaaagacccgttatatgaagaattgcttcaaaaagcgccggagtacgaagttaagccccagaatgcaagaattgataaagtgtggaaaagcattccaggctacaatggattaaaggtcaatattgaacaatcatataaaaaaatgaaacagcatggtgagtttcgggaaaaagatttggtgtacagtcaagtaaaaccaagtgttcatcttgagtcacttcagcctgagcctatttataaaggaaatcctgacaaaccgatggtggcttttttaatcaatgtggcatggggaaatgagtatttggaaaaaatgcttcctattctgcaaaagcaccaggttaaagctacgttctttttagaaggcaattgggtgagaaacaatgtacagctcgctaagaagattgcaaaagacggacatgaaatcggaaatcattcatacaatcatccggatatgagcaaactgactacaggaagaatttccgagcagctcgacaagactaatgaacaaatagaacaaacgatcggcgttaagccaaagtggttcgctccgccaagcggaagtttcagaaaagcggttatcgacattgcagcagagaaacagatgggaacagtcatgtggacagttgatacaatcgattggcaaaagccggctccgtctgtacttcagacgagagtgttaagcaagatacataatggtgccatgattttaatgcatccgactgaccctacggcggaaagtcttgaagcgctgattacacagataaaagacaaaggatatgcgcttggaacagtcactgaactaatggatgaaacaagactattgaagtaacagatgaaggcagcttgtctttgaataggaggaacaaatttgattaaacgatatacgtgtcaaaatggtgtaagaattgtgctggaaaataacccgacagtccgttctgttgcgatcggcgtatggatcggcacaggttcgagacatgaaacgccggagataaacggaatttctcactttttagagcacatgttctttaaagggacgagcacaaaatctgcacgcgagatagcagaatcttttgatcgtattggcggccaggtcaatgcgtttacttcaaaggaatatacctgctactatgcaaaggtgcttgacgagcatgcgaattacgcgctggacgtattagcagatatgttctttcattcaacgtttgatgaaaacgagctgcaaaaagagaaaaatgtagtatatgaagaaattaaaatgtatgaagatgcgccggacgacattgtacatgatttactgagcaaagccacttacggcaatcattctttaggctacccaattctaggcacggaagaaacgcttgcttcctttaacggtgactctctcagacaatacatgcatgattattatacgccggaccgagtggtgatttcggtagcgggcaatatatctgacagttttatcaaagatgtagaaaaatggttcgggtcatacgaggcgaagggcaaagcgacaggccttgagaagcctgagttccacacggaaaaactgacgagaaaaaaagaaacagagcaggctcatttgtgccttggatttaaaggcttagaggttggccatgaacgtatttatgatttaatcgtcctcaacaatgtgctcggaggcagcatgagcagccggctgttccaagatgtgcgtgaagataaaggacttgcttattctgtttacagctatcacagctcatatgaagacagcggaatgctaacgatttacggcggaacgggtgcaaatcagcttcagcagctgtcggaaacaattcaagaaacccttgccacattaaaacgtgacggcattacctcgaaagaactggaaaacagcaaagagcaaatgaagggaagcttaatgctgagcttagaaagcacaaacagcaaaatgagccgaaacggaaaaaatgaactgctgctcggcaaacataaaacattagatgaaatcatcaatgaattaaacgccgtgaacttagagcgtgttaacggccttgccagacaattgtttactgaagactatgcattagcacttatcagcccttccggcaatatgccgtcttaaaaaggaaagcctgctccataatggagcaggcattttttaatccctttcatcatacatagtacaagggggtgacagacatgcggctcagtgaattatcaggaaaggaaattgtagacatcaaaagagctgaacggctcggagtgctcggccagaccgatttggaaatcaatgaacaggatggacagattacagcactcctcattcccacagttaagtggtttggtttgagaaagcaaggtcatgacattcgtgtcccatggcaccatattcaaaagatcggttcagatatgattatattagatgtacctgaggaaatgcctcctcgacaagagtaaatagcccaattgactgtgaagcgggctctaaagaaaacatctgaaacatcggctgccggagccgatgtttttttatatggaaaaagcgcatcttttatattcaccggtatttccttttgatcataagatgaaggggagcttaacaactagagatccagtatatacaaagaaggtgaacgtttagaatgttaaccggattgaaaattgcagttatcggcggtgacgcaagacagctcgaaattataagaaagctcactgaacagcaggctgacatctatcttgtcggttttgaccaattggatcacggttttaccggggcagtaaaatgcaatattgatgaaattccttttcagcaaatagacagcatcattcttccagtatccgcgacaacaggagaaggtgtcgtatcgactgtattttcgaatgaagaagttgtgttaaaacaggaccatcttgacagaacgcctgcacattgtgtcattttctcaggaatttctaacgcctatttagaaaacattgcagctcaggcaaaaagaaaacttgttaagctgtttgagcgggatgacattgcgatatacaactctattccgacagtagaaggaacgatcatgctggctattcagcacacggattatacgatacacggatcacaggtggccgttctcggtctggggcgcaccgggatgacgattgcccgtacatttgccgcgctcggggcgaatgtaaaagtgggggcaagaagttcagcgcatctggcacgtatcactgaaatggggctcgttccttttcataccgatgagctgaaagagcatgtaaaagatatagatatttgcattaataccataccgagtatgattttaaatcaaacggtactttctagcatgacaccaaaaaccttaatattggatctggcctcacgtcccgggggaacggattttaaatatgccgagaaacaagggattaaagcacttcttgctcccgggcttccagggattgtcgctcctaaaacagctgggcaaatccttgcaaacgtcttgagcaagcttttggctgaaatacaagctgaggaggggaaataaggatgtcgtcattaaaaggaaaaagaatcgggtttgggctgaccgggtcgcattgcacatatgaagcggttttcccgcaaattgaggagttggtcaacgaaggagctgaagtccgtccggttgtcacatttaatgtaaaatctacaaatacccgatttggagagggcgcagaatgggttaaaaaaattgaagacctgactggatatgaggccattgattcgattgtaaaggcagaacctcttgggccgaagctgccccttgactgcatggtcattgcgcctttaacaggcaattcaatgagcaagctggcaaatgccatgacggacagcccggtgctgatggcggcaaaagcgacaatccggaacaatcggcctgtcgttctgggtatctcgacaaatgatgctcttggtttaaacggaacaaatttaatgaggctcatgtcaacaaaaaatatcttttttattccattcgggcaagatgatccatttaaaaaaccgaattcaatggtagccaaaatggatctgcttccgcaaacgattgaaaaggcactcatgcaccagcagcttcagccgattctagttgagaattatcagggaaatgactaaatttacagaaaatctttcccaaactaaaaaattcggtcatagcccgcatattctatggtaaaataaaacgtaaaatcatagtcaaatcaattcaatgaagctgattggcggaaggagttttacagatgggaagaggtttacacgtagctgttgtcggagcgacaggggctgtgggacaacaaatgcttaaaacacttgaagacagaaactttgaaatggacacacttacattgctatcttcaaaacgctctgcggggacaaaagtcacgtttaaaggccaagagctgactgttcaggaagcttctcctgagagctttgaaggggtaaatattgctttgttcagcgccggcggaagcgtatcacaagcattggcaccagaagctgtaaaacgcggcgctattgttatagataatacgagtgcgttccgcatggatgaaaatacaccgcttgttgtgccagaagtgaatgaggcagacttgcatgaacacaacggcattattgccaatccaaactgctctacaatccaaatggttgcggcacttgaaccgatccgcaaagcatatggcttaaacaaggtcatcgtatcaacttaccaggcagtatcaggagcgggtaatgaagctgtaaaagagctttacagccaaacacaggcgattttaaataaagaagaaatagagcctgagatcatgcctgtaaaaggtgacaaaaaacactatcaaatcgccttcaacgcgattccgcaaatcgataaattccaagataacggctatacgtttgaggaaatgaaaatgataaatgaaacgaaaaaaatcatgcacatgcctgaccttcaagtagcggctacatgtgtgagactgccaatccaaactgggcactcagagtccgtctacatcgaaatagaccgtgatgacgctacagttgaagatattaaaaatctattgaaagaagctccgggcgtgacacttcaggatgatccaagccagcagctttatccgatgcctgctgatgctgtcggcaaaaacgatgtgtttgtgggccgcatccgtaaagacttggacagagcaaacggttttcatttatgggttgtttctgataacctattaaaaggcgcggcatggaactctgttcaaattgcagaaagcctgaaaaaactaaacctcgtataaaagagagaattttctaaagacgaatagaagagagtaaggcgctatcagcctgctctcttctgttacgtccgaataatttggagtgaaaacagtgaagataattgttcaaaagttcggcggaacatcagtaaaagatgataaaggccgcaaactggctttagggcatattaaagaagcaatcagtgaaggatataaggttgtcgttgtcgtttcagcgatgggccgaaaaggagacccgtatgcaacagattctttacttgggctgctttacggcgatcagtcagcgatttctcctagggaacaggatttgcttttatcttgcggagagactatttcctctgtcgtctttacaagcatgctgcttgataacggtgtgaaagcagctgcgctgacaggggctcaggctggctttttaacgaatgatcagcataccaatgcgaaaatcattgaaatgaaaccggagcgtttattcagtgtgctcgccaatcatgatgcggtagtcgtcgcaggcttccagggcgcaactgaaaagggtgatacaactacaatcggcagagggggcagcgatacgtctgcagccgcactcggagcagctgttgatgcggaatacatcgatattttcaccgatgtagaaggcgtgatgactgctgacccaagagtggtggaaaatgcaaaaccgcttcctgttgtgacgtatacggaaatctgcaacctggcgtatcagggggccaaggtcattcatccgcgtgctgtggaaatcgcaatgcaggccaaggttccgatccgcgtccgttcgacttattcgaatgataaaggtacattggtgacatcacatcactcttccaaggtcggcagtgatgtttttgaaaggctgattacgggaatcgcccatgtcaaagatgtcacgcagttcaaagtgcctgcgaaaatcggccagtataacgttcagactgaagtgttcaaggctatggcaaacgctggaatcagtgtcgatttctttaacattacacctagtgaaatcgtctatacggtagccggaaataaaacagaaacagctcagcgtattttaatggatatgggctatgatccaatggtgacgagaaactgcgcgaaggtatcggcggtcggcgcgggcattatgggtgttcccggtgttacgtccaaaattgtatcggctctttcagaaaaagaaattccgatccttcagtcggctgacagccatacgacgatatgggtgctcgtccatgaagcggatatggttcctgctgtaaacgctttgcatgaagtgtttgaactttcgaagtaaatgtgattgaatcatgatgaggtgaataaaatgaatttcggaaatgtgtctacagcgatgattacaccctttgacaataaagggaacgtagactttcaaaaactgtctacactgattgattacttgttgaaaaacggaacggattctttagtagtagcgggaacaactggagaatctccgaccctttcaactgaagaaaaaattgcgctttttgaatatacagtaaaagaagtaaacggacgggtgcccgttatcgctggtactggaagcaacaacacgaaagattccattaagctgacaaaaaaagctgaggaagcgggcgtggacgctgttatgcttgttaccccgtattacaataaaccttctcaagaaggaatgtaccagcattttaaagcaattgcggcagagacatctcttccggttatgctctataatgttcctggccgtacggttgcttctcttgctcctgaaacgacgatccgtttggcggcagacattccgaatgtggttgcgattaaagaagcgagcggagacctcgaagcgattacaaaaattattgctgaaacacctgaagacttctatgtctattcaggggatgacgctctgacgcttccaattctttcagttggaggaagaggagttgtgtcagtggcgagccatattgcaggcactgatatgcagcaaatgatcaaaaattatacgaatgggcaaacagctaatgcggcactgattcatcagaaactgctgccgattatgaaggaactgtttaaagcgcctaatcctgctccagtcaaaacagcgcttcagctgagaggtcttgatgtcggttctgtgcgtctgcctctagtcccgttaactgaggatgaacgtctgagcttaagcagcacgatcagcgaactgtaagaaaatttcatacagtgaaacaaacgcggtcattctcacattcagctgagtttgaccgtttcttttacatattggttttccctaaaccttctgctttatcttgttttctaaatttactttcagttataataggaacaagtgatgatggacgggtatgagactaggaggatatagattttgaaaaagaaaaatacagaaaacgttagaattatcgcccttggcggtgtcggagagattgggaagaacctttatgtcattgaaattgactcagacatatttgtcgttgatgccggccttatgcatccagaaaacgaaatgctcggtattgatgtagtgattcctgacatatcatatttgattgaacgggctgaccgcgtcaaggcaatctttttaacgcacgggcacgatgaaaatatcggcggcgttttttacttattaaacaagctgtccgttccagtgtacggaacaaaattgacgcttgcactgttaagagagaaattaaaacaatacggacataaccgaaaaactgatttaagagaaattcactccaaatctgtcattacatttgaatcaacaaaggtatcgttctttagaacgattcacagcattcctgattctgtaggtgtgagctttaaaacatcacttggatctattgtatgcacgggagacttcaaatttgaccaaacacctgcacttaatcagacgtgcgacattggcgagatcgccaagatcggcaatagcggcgtgctcgctctgctttctgacagtgcaaatgcggaacggccgggttacaccccttcggaagcggctgtcagcggagaaatttcggatgcgctgtataattcacagaaccgggtgattattgctgttttcgcatccaatattaaccggattcagcaagtcattcatgcagcggctcaaaatggcagaaagattgccgtagccggaaaaaatcttcaatctgtcctgcagctggcgagaaagttaggatacattgaagcagatgatgaattgtttatttctgtacaggatgtcaaaaaatatccgaagcgcgaagtggccattattacagccggaagccaaggtgaaccattagctgctttgacaagaatggcaaacaaagctcacaaacagctgaacattgaagaaggggatacggtggtcattgcgtcaactccgattcccgggcaggaactcatttactctaaaacagtagatcttcttgcgagagccggtgcacaagtcatctttgcccaaaagcgtgttcatgtatcaggccacggctcacaagaagagttaaagctaatgatcaacctgcttaaaccaaaatatttgattcctgtaaacggcgaatacagaatgcaaaaagctcattcaaaaatcgctgaagaaaccggcatgaagcgcagcgacatcttcttaattgaaaaaggcgacgtcgttgaattccgcggccaaaacgtaaaaattggggataaagttccttacggcaatattttaattgatggtttaggtgtcggtgatatcggcaatatcgtattgagagaccgccgcttgctttcacaggacggaattttaatcgttgtcattacacttgataaacaaaagaaaaatcttgtatcaggaccagaaattatcactcgcggctttgtttatgtaagagagtctgaaggtctaatcgtacaggctactgagctcgtccggtccatcgtgacagaagcgactgaaacatcaaatgtcgaatggtcaacgctgaagcaggcaatgcgggatgctttgaaccaattcctttatgaaaaaacgaaacgtaaaccgatgatcatcccaattattatggaagtataatgactgactaaagaccggagttgctccggtctttattttttgtccttcaagccgggattgaatgaagtatctttgttcataatacaaagagaaactcggaaaggatgaaagcgagatggatcatcgtatggaaaacacagaagaagagcgtcctgaaaaaaatgatgcgaaggacagcattatgaataaaatacagcagcttggtgaaacgacgcttccgcagctgccccaagatacaaatattcattgtctgaccattatcggacaaattgaaggccatgttcagcttcctccgcaaaacaaaacaacaaaatatgaacatgtcatcccgcagattgtggcaattgaacaaaatcccaaaattgaaggcttgctgatcatattaaatactgtcggaggagatgttgaagctggtcttgccatagcggaaatgcttgcatctttatcgaaaccgaccgtttctatcgtgcttggcggggggcattccatcggcgttccgattgctgtatcctgtgattacagctatatcgccgaaacagcaacgatgacgattcatccagttaggctcaccgggctggtcatcggggtgccgcaaacgtttgaatacctggataagatgcaagaaagagttgttaaatttgtgacaagccattccaatataaccgaagagaaatttaaagagctaatgttttcaaaaggaaacttaacacgcgatatcggaacaaatgtagtcggtaaggatgcagttaaatacggattgatcgatcacgcaggcggtgtcggacaggcaatcaataaactgaatgagctcatcgacgaagcaaggaaagaagaaggacggatgattcaatgattctttataccgtgatgccgcaggaaattgtgtttgcagaacagaaccaagagacaagcgcacatgagcaaattgaatataaaggtgtaccgcttctagtcgaaatgaaagggaatgaagcggaagtcattcaaatcatgagcaccaatccaatgcattttctgcatccggacatttcacccggacaaaagctgaaattaaacgtataagaatccaacccttttttaagggcaaaatatgctataataggggaatcctacagaaaaaacgcagcctgtaaacggctgctttcttcattatgtatgaacttacattttttaacgcagtaaggtgatgagtgtggcaaagaaaaaacgaaaatcaagaaaaaaacaggcgaaacagctaaatataaaatacgagctcaacggattgctgtgtatagccatttcaattatcgcaatcttgcagctgggggtagtcgggcaaacgtttatctatttgttccgcttttttgctggagagtggtttattttatgcttgttaggtttattggtgttaggagtctcactgttttggaagaaaaaaaccccaagccttttaacgagacgaaaggccgggttgtactgtatcatcgcaagcatattgctgctttctcacgtgcagctatttaaaaatttgacgcacaaagggtctattgagtctgcaagcgtggtgcgcaatacgtgggaattgtttttaatggacatgaatggcagctctgcttcacctgatttaggcggagggatgatcggtgcgctgctgtttgcggcttcacactttttgtttgcgtcgactggttctcagatcatggcaattgtcatgattttgatcggaatgattttagtaacaggacgctcgctgcaagaaacgctaaaaaagtggatgagcccgattggacgttttataaaagaacaatggttagcatttattgatgatatgaaatccttcaaatcaaatatgcagtcatcgaaaaaaacgaaagcgccgagcaaaaaacaaaaaccggcccgcaaaaaacagcaaatggaaccggagcctcctgatgaagagggggattatgaaacagtatcgcctcttattcattcagagccgattatctcaagcttttctgatcgtaatgaagaggaagagtctccagttatagaaaagcgccccgtacctgtgtcgaagccgcttcaggacatccaaccggagacaggtgatcaggaaactgtttctgctcctcctatgacctttacagagcttgaaaataaggattacgagatgccgtcactggatttgctggcagatccgaagcataccggccagcaggctgataaaaagaatatttatgaaaatgccagaaagcttgaacgcacattccaaagctttggcgtaaaggcgaaagtcacacaggttcatctcggaccggctgtaacaaaatatgaagtatatcctgatgtcggagtgaaggttagcaaaattgtcaatttaagcgatgatttagcgcttgcgcttgctgcgaaggatatcaggatcgaagcgcctataccaggcaaatcagcaatcggaattgaagttccaaacgcagaagtggcaatggtttcgctgaaagaagtgctggagtctaaattgaatgacagaccggatgcgaagctgttaattggactcggccgcaatatttcaggtgaagctgtattggctgagttaaacaagatgccccaccttttggtcgcaggcgcaaccggtagcgggaaaagtgtctgtgtcaacggcattattacaagtattttaatgcgggcgaaaccgcatgaagtgaaaatgatgatgatcgatcctaaaatggtagagctaaatgtctacaacgggattccgcatttgcttgctcctgttgtaaccgatccgaaaaaagcgtcgcaggctttgaaaaaggttgtcaatgaaatggagcggcggtacgaattattttctcatacgggtacaagaaatattgaaggatacaatgattatataaaacgcgccaacaatgaagaaggagcgaaacagccagagctgccttatattgttgtcattgtggacgagctagccgatctcatgatggtcgcttcatctgatgtggaagattcgattacgagattgtcccaaatggcgcgggctgccggcatccatcttattattgcgacacagcggccatcggtggatgttatcacaggggtgatcaaagcgaacattccgtcacgaatcgcgttcagcgtatcttcacagacggattcaaggaccattcttgacatgggtggcgctgagaagcttcttggccgcggcgatatgctgtttttacctgtaggggctaacaaacctgtccgtgtgcagggagcatttttgtcggatgacgaagtggagaaggtcgtcgaccatgtgattacgcagcagaaagcgcaatatcaagaagaaatgattcctgaggagacaacagaaactcattccgaggttactgatgaactttatgatgaagctgttgaattaatcgtcggcatgcagacggcatctgtttcaatgctgcaaagaagattcagaatcggctatacgagagcggcgcgcctgattgacgcaatggaggaacgcggtgttgtcggaccgtatgaaggcagcaaacctagggaagtattattatcaaaagagaaatatgatgagctctcttcttaatgaagggagttccgctctctatagttgtcaataataacattatgtaaactgatcacctttctatttattttttcgacaaaacatgatatagttgtcccaattgttcaataatttttatcgaaagtggtttacggaggggaaacatgtctacaaaagctgataatcggcacttgtatttgaaagtaattgaacgaattaaagaggatataaaaaatgggatctacactgagaaggaaaagctgccttctgaatttgagctttccaaaaagcttggtgtcagcagagcgacgctaagagaagccttgcggatactggaagaagagcatgtgattatcagaaggcatggtgtaggcacttttgtccattctaagccgttatttctttcgggcattgaacagctgaacagtgtaaccaagatgatagaacaggcgaatatgacccctggcacgatttttctatcatcacaagtgcttatgccgtctgaagatgatacgaagagatttcatttggcagaagggcaagaacttttttaccttgaacgagtcaggacagctgacggacagccgattgtgtattgtatagacaaaattccgatgaatattttgccgaattctttttctcatcagcaagaatctatgtttgaccttcttgagaaaaattcaggctccgtaatcagctatgcagtaactgatatagaaccgatcggctatcacgataccatttctccagtgcttgaatgcgatcctgaaacagcccttttgctgttaaaacaaacccattacgatcagcacgataaaccggtgctttattctttaaattattttagagcggataaattcagatttcatgttttgcgtaaacgattctaaaaacggacgcctgtatgtgtctgtttttttatttgcactgattcatgtttctttgtacatactttcattccggttaacgcaatatataagggatgacaagaaagtgaatgggtgaaaatgttgagagagaaaaatggaatgaaaaatattattgcattgtcttctgtcccgcttgtgatgacactcgggaactccatgctgattcctgttcttccgatgatggagaaaaagctgtctgtgacttcatttcaagtatctttaatcattactgtatattcagtagtagcaattatttgcattccgattgccggatatttgtcggatcgtttcgggagaaaaaaaatattgcttccatgcctcctcattgcaggattggggggagccgtagctgcttttgcctcgacctatatgaaaaatccttatgctatgatcttggcggggcgggttcttcaaggcattggttctgcaggtgccgctccgattgtcatgccgtttatcggcgacctgtttaaaggagacgatgaaaaggtcagcgcgggtcttggcgatattgaaaccgccaacacgtcagggaaggtactgagtcccatacttggagccttactggcttcttggtattggtttgtaccgttttggtttattccgtttttctgtttgatcagctttttgctcgtattgtttttggtggccaagcctgaagaagatgaagatgcgcctgctgtttctgagtttattaagagtgtgaagaaaatttttaaacaggatggtcgctggctttatacggtcttcattatcgggtgtgtcattatgtttttgttatttggcgtattattttatttatcagatacgctggagaacaagtatgctattgacggagtagctaaaggcggattactggcaatcccacttttgtttttgtcaaccagttcttttatagctggcaaaaagatcggtaaagataaaggccgaatgaaattttgcgttgttacaggaatgattctgttaaccctttcgtttattgccttgtggtggaaccacagtttttattttttatttgtctttttaagctttggcgggattgggattggaatggctcttcctgctttagatgcattgataaccgaagggattgaaagtgaacaatgcggaaccatttcctccttctacaatagcatgcgctttataggagtagctctcggtccacctgtttttgctgcattaatgtctaatgcaaactggattattttcatactctcggcgttttgcagcatcgtttctttatttttagtgctctttactgtagatgctaaaaaaagtgaagaagaagaaaaaaacttagggacggtctagccagccgtctttttttgcgcttccttgcacagtttacaactgtacctatacagcatgcggaggttattgtttccttataaatcctacagttgctataattacatgaaagagtgtttctgcgaatgctgaaaattggtcataatacatactaattaagaaatgaacgaaggaggttccatatgtcatatgttaatgaactcaaatcaaagcacggcggtttaaccgcacacattgtaaaaacagaaaaattcaaaaccgtctcgcttatttttaagatgcttgcgccgctgacaaaggatcaagtcaccaaaagagcgctgcttccgcatgtgcttcttcgcggaacgaaaagccatccgaaaaccgcagaattgcgttcatacctggatgagctgtacggcacgtcagtatcggctgaccttacgaaaaaaggagagcggcacgtcattacgttcaggcttgaaatcccgaatgaaaaatatttaaaagaccaaacgccgctacttgagaaagggctccagcttcttgcagaaatcgtcttttcacctgctttagagggagacgcttttcagtcacaatatgtggctcaagaaaaacggacgcttaagcaaagaatccaagccgtctatgatgataaaatgcgctattcgaatttaaggctgatacaggaaatgtgcaaaaatgagccttacgcgcttcatgtcaatggtgaaatcgacgatgttgatgacattacggcagagcaattatacgaaacataccaaagcgctatccaaaaagaccagcttgatctatatgttgttggcgatgtggacagtaaccaggtacaatcggcaattgataagtatttcaaaacagaagagcgcactcttggcacgattgaaaacaatcacgctgatgaaaaagttcagccaaaagaagtaattgatgaagaggatgtcaagcaaggaaaactgaatatcggctaccgcaccagcatcacttatacagatcaggattatcctgctttacaagtgtttaacggattgttcggcggattctctcattctaaacttttcattaatgttcgggaaaaagccagtcttgcttactacgcggcttcccgtatagaaagttttaaaggcttgttaatggtgatgtcaggcattgaagtgaaaaattttgaacaggcggtttcgattattgctgagcaattccaggcaatgaaaaatggcgatttcagtgagcaggatatagcacagacaaaggccgtcattcgaaatcaagtgctggaaacgattgatacagcatacggtttatctgaatttttatatcagcaggctgctgctcaagtcgagattcctatcgaagactttcttgccaatattgagaatgtcacaaaagaggatatcattaaagccggcgaaaagattcagcttgatacgacttatttcttaaaagggacggagggtgcatcttgatcaaaccaatcgaatatgaacagcttcaggagacgctgtatcatgaaaaaatgtccaacggccttgatgtttacgttttgccgaaaaaaggcttcaacaagacatatgcggtctttacaacaaagtacggctcgatagataaccggtttgtccctttaggtaaaaacgagatggttcacgtgccggacgggattgctcactttcttgagcacaagctgtttgagaaagcggacggagacgtttttcaagatttcagtaaacagggggcttctgccaatgcgtttacgtcatttacaagaacggcttaccttttctcaagcacatcaaatgttgaacgcaatttagagacgcttatcgattttgtacaggacccatattttactgaaaaaacggttgaaaaggaaaaagggattatcgggcaggagattaatatgtacgacgataaccctgattggaggctttacttcggggtcattgaaaacatgtacaaagagcatcctgtcagaattgacatagcgggaacagtggaaagcatttcacatattacaaaagaccttctttatgaatgctatgaaacgttttatcacccgagtaacatgctccttttcattgtcggccctgtagatcctgaagcgattatttctcaggtaagagaaaaccaggggaaaaagccgtatactgatcagccggagatcaaacggaaagaagtgaaagagcaagaagcggttttccgaaaagaaaaagagatcaaaatgaacgtgcagggaccgaaatgccttgttgggctgaaatccaaaaatccgtttaaattaggcaaagagctcttaaagcatgaactttcaatgaacttattgcttgaagctctttttggcaaaagctctgcccagtatgaatcactttatgaaaaaggatatattgacgaaacgtttagctttgattttactgctgaatatgggttcggttttgcggcgatcggcggagatacgcctgagcctgatcaattagctgaagacatttcaagcatgcttttgcgcgccggtgaactgattactgctgaaaagattgaacttgccagaaagaaaaagatcggcacattcttaaaagcgctgaattcccctgaatacatcgccaatcaatttacccgttatgcgttcttggatatgagcctgtttgacgttgtaacggtactcgagcagattaccctcgaggatgtccagaacgtaatacaagaggaaatcgctgcagacaggctgactgtctgcaaggttgttcctaaatcataaacaaaacatccctccagtgtgaggggtgtttttctgcggaaagaaggaaagagaatgaacaaaacagcactaatcaccggagcaagcggcggcattggcaaaagcatcagcgaaacccttgcggctaaggggtacaatctgctgctgcattacaatacaaatcaaaatgcggcagcggagcttgctgaaaaactaagtcagatgtttggcgtaaatacggagatattacaagctgatctgtccgcgcaagatggagcagataagctgacaagttcaattgttcagccggttgatgcgattgttttaaacagcggacgaagccattttgggctgattacggatgtagataacgcaacggttcaggaaatggttcagcttcatgtagcgagtccgtatatgctgacgagaaaccttctgccaggcatgattcggaataaatcgggagcgattgtggctgtcagctcgatttggggagagactggggcatcctgtgaagtgctgtacagcatggcaaaaggagctcagcattcgtttgtaaaaggattggctaaggagctggcgccaagcggaatcagggtaaacgcagtagcgccgggcgcagttgatacaaatatgatgaatcaatttaccccggctgaaaaagaagagatcgctgatgagattccgatcggccggctggcccggccgcaagaaattgcggatgcaacagcttttctcctgtctgaaaaagcgtcatatatcaccggccaaattctgtcggtgaatggcggctggcactgctgatccgaaaatattcggtgtatagtttcttttgcgaaggacacaataatcttgtaacttcacatgaaatggaggaaacaagcatgtcagtattagaaaactgggatagctggaaaaacttccttggcgaccgtctaaactatgcgcaagataaaggtatgagccaggatacgattacagatcttgcgacagaaatcggcagctacttggctaatgaagtggaatctaagaacgagcaggaaaaagtgctggcagatctttggagtgtagcatcaaaagatgaacagcacgccattgccaatatgatggttaagcttgttgaaaataacagcactcactaggaagagaggggatttttcctctcttttttatgttttcctcatcacagcaacattcttctttctaattagagaaaaatgctttatgataaaggaaggtaaaattttgccacaatgaagggggtatatcatttggcaaagctcgaatggtattttgaatatgaaattcaagtgaaccgccccggactgctcggggatatttcatctcttcttgggatgctttctatcaacatcgtaacgataaacggcgtcgatctttccagaaggggaatgctcctcaggtgccgccatatagatcaaattaaacgattagaatcaatcttaaaaacgatggaaacaattaaagtaacgaagcttagagaaccgaggcttcgcgaccgtcttgccgtacgccacggccgttatattcaacgggatgccgatgacaagaaaacgttccgctttgaacgggacgagcttggcttattagtcgattttatggccgaattgttcaaaaaagaaggccataaattaatcggaatcagaggtatgccgcgtgtggggaaaacggaatcgattgtagcctctagtgtgtgtgcaagcaaaaggtggctgtttgtgtcatcaaccttgctgaagcagacgataagaagccagctgattgccgatgaatacagcactgaaaatgtctttatcgttgacggaattgtgtcaacacgaagaggatcggaacgccatctccagctggtccgagaaatcatgcggctgcctgcaacaaaagtggtggagcatccggacatattcgttcaaaatacagagtatacattagatgactttgattatattattgaactgagaaatgaccctgatgaggttattacatatgaacatgccgaggaaccccaaatgtttgatcaatccgggttttcaagctttgatttttaaaattggaaggtgtttgttgtgactgaactaggaatccggctcaaagaagccagagaggaaaaagcaatgtcattggatgatctccaagcggcaacaaagattcaaaaaaggtatttaaccgccttggaggaaggaaactatgacattattccggggaagttttatgttcgggcattcatcaagcaatatgcagaagccgttgggcttgatgcggatcagctgtttgaggagcataaaaaagatatccctaatacgtatcatgacgatgtgtctgaaaagatctccggcatgaatcttcaaaaggaaatgccaaagccagcatctaaggcgctggagctgctgccaacgatacttgttattctcggcgtgattgttgtgattgccattgtgtacgcgatcattcaatttgccaatcacaaaaacagtgatgatcacaatgcggcatcagaaaaagcaattacgcaaagtgagagcaaatacgaaatccctaaagattcaacgctgaaagagaatcaaaataacagctctgaaaaagagacagacactaaaaaagaaacgaaagaaaacgaagataagaaaaaagaaaatgacagtgagaagctggagattaaagctgctggcactgaaggatcgttaacgacttatgaagtgtccggcgctgataaaatcgagctggaactgaaggcatcagacagctcgtggattcgagtgcgcgatgaaaacagcagctctttaaaagaaggaacgctgaaaaaagacgaaacctataaaaaagacataactgatcagaaacaagttgatatccgcaccggatatgcacctaatctgaaaataaaaatcaacggtaaggttctttcatatgaacttgatccgaaaaaagtgatggcacaaaccataaagattgtaaataaaaaggaagaaaagtcatcttaattatcagatgacttttcttcacgtccgagtatgaaattggaggggctttatgtttaacttaccaaataaaatcacactagctagaatcgcattaatcccaatcttcatgattatcatgctggcgccgtttgactggggcaggctcgaagttggagacgaatcaatcccggtcgcacatttggcgggggccattctatttattattgcatctacaacagactgggtggacgggtattatgcccgaaaattgaatctcgtaacaaacttcgggaaatttcttgatccgcttgcggacaaactgctcgtatccgcagcgttaattatccttgttcaatttgatctcgctccagcttggatggtcattgtgattatcagcagggagtttgccgtgacaggtttaaggcttgttttggccggaacaggagaagtcgtagctgctaacatgcttggtaaaatcaaaacctgggcacagattattgcggtatccgcattgcttcttcataatcttccatttgaacttgtgtcattcccgtttgcggacttggcgctgtgggtagccgtcttctttactgtcgtttcaggctgggaatatttctctaaaaactgggaagcgttaaaaacatctaactaagaaagaaggacttcgtcatggaatttccaaaaaaagcagaaataattgcagtcggttcagagctgctgcttggccaaatcgccaatacaaatgctcaatttatcagcaaacagctcgctgaaatcggggtcaacgtattttatcatacagcggtcggagataacccggagcggctgaagcaggtcatccgcattgctgaagaacgctctgacttcattattttttcaggagggcttggacccacaaaagatgatctgacgaaagaaacgattgcaaatacgctgggacgtccgcttgtgttaaatgatgaggcattccaatccattgaggactatttcaaacgaacaaaacgcacgatgtcacctaataaccgaaaacaggcgcttgtgatcgaaggctctgacgtgctggcgaatcactttggaatggccccgggaatgctcacagagcatgaatcgcgctattatatgcttcttcctggaccgccgagcgaattgcgtccaatgtttgaaaacgaggcaaagcctcttctgctgaaaaagatgggttcaaatgaaaaaattgtgtcaaccgttcttcgctttttcggtatcggtgaatctcagcttgaagccgatttggaagatattattgatgcacaaaccaatccgacaattgcgcctttggcggctgatggagaggtgacgctgcgtctgacagccaaacacgccgatgaaaaggaaacagagcgtctgttaaaagaaacagaggccgttatcttagagcgtgtcggtgaatttttctatggttacgatgatacttctcttgtaaaagagctatctatagcgtgtaaggaaaaaggcataacaatttctgcggcagaaagctttaccggagggctgttttctgaatggctgacggatcatagcggtgcctcaacattatttgccgggggcgttgtttgctatacaaacgacgtgaagcagaatgtgcttggtgtcaagaaggaaacattagatcgttttggggcggtcagcaaggagtgcgcatccgaactggctaagggtgttcaaaaactcactggcagcgatatcggcattagctttactggtgtagcaggacctgatgctcaagaagggcatgagcctgggcatgtgtttatcggcatttccgcaaacggtaaagaagaggttcacgagtttcactttgcgggctccagaacggggatcagaaaacgcggcgctaaatacggctgccatttaatcttaaagcttttagagcaaaaataatattttcagcacattatcctcctaagaaaacatgatttctctgatacattatgatattttgataggaatcacgccaagaaaaaatccgaatatgcgttcgcttttttcttggcaaatcccttcaaacagggtatagtatatgtagtggtaacataaaggaggaaaaaatagaatgagtgatcgtcaggcagccttagatatggctcttaaacaaatagaaaaacagttcggcaaaggttccattatgaaactgggagaaaagacagatacaagaatttctactgtcccaagcggctccctcgctcttgatacagcactgggaattggcggatatcctcgcggacggattattgaagtatacggtcctgaaagctcaggtaaaacaactgtggcgcttcatgcgattgctgaagttcagcagcagggcggacaagccgcgtttatcgatgcggagcatgcgttagatccggtatacgcgcaaaagctcggtgttaacatcgaagagcttttactgtctcagcctgacacaggcgagcaggcgcttgaaattgcggaagcattggttcgaagcggggcagttgacattgtcgttgtcgactctgtagccgctctcgttccgaaagcggaaattgaaggcgacatgggagattcgcatgtcggtttacaagcacgcttaatgtctcaagcgcttcgtaagctttcaggggccattaacaaatcgaagacaatcgcgattttcattaaccaaattcgtgaaaaagtcggtgttatgttcgggaacccggaaacaacacctggcggccgtgcgttgaaattctattcttccgtgcgtcttgaagtgcgccgtgctgaacagctgaaacaaggcaacgacgtaatggggaacaaaacgaaaatcaaagtcgtgaaaaacaaggtggctccgccgttccgtacagccgaggttgacattatgtacggagaaggcatttcaaaagaaggcgaaatcattgatctaggaactgaacttgatatcgtgcaaaaaagcggttcatggtactcttatgaagaagagcgtcttggccaaggccgtgaaaatgcaaaacaattcctgaaagaaaataaagatatcatgctgatgatccaggagcaaattcgcgaacattacggcttggataataacggagtagtgcagcagcaagctgaagagacacaagaagaactcgaatttgaagaataaaaataaaataagtttcaaatgatacaaaaggctgagtgaaaaactcagcttttttgtattttgcaaaaaaatgataaaaatattgctttttttgacaacttttttagggctttattcgtctaacaaaacgtgtgcaaaatggaatttattttgggaggaaaaaatgaatgacaagcccaacccgcagaagaactgcgaaacgcagacggagaaaactaaataaaagaggaaaactgttgcttggtcttttagcagtgatggtttgcattacgatttggaatgctcttcatcgaaatagtgaagaaaacgaaccatctcaagaaactgcagcggtttcaaataccgatcagaaaaaagaggtcaaaaagaaaactgccgaaaaatcagaggaacaaatcaaaacagtggatcgaaaccaaaaaatcagcaattatttaaaagagatcggtttcagcggaacagccatgattgtcagaaatggagaaatcgtaacaaataaaggttttggctatgctgaccgtaaacactacattcaaaataatccattgacatctttttatgtcggttcatcacaaaaagcgctaattgcaactgctattttgcagcttgaggaaaaggggaaacttcagacaagtgatccggtaagtacgtatttacctcattttcctaacggacaaacgattactttgaagaatctgcttacacatacatcggggataaacggacatattgaaggaaacggcgccattactccggacgatttaataaaagatatagaacttcagggaatcaaacgtcagccgggcgtatgggactacaaggattccaactattctgttcttgcttatattattgctgaagtaagcggtgagccctatgaacagtacataaagaatcatatttttaaacctgcgggaatgacgcatgcaggcttttacaaaacatatgaaaaagaaccttatcctgccgtcgggtataagatggagggcagcaaaacagttacaccgtatatacctgatttatcccagctgtatggagcgggtgatatttatatgagcgctatagatatgtacaaatttgaccaagcgctgatagacggaaaactgtattcgcaaaaaagctatgaaaagatgtttacgccagggagcagctccacatacggcatgggattttatgttgctcccggaagctattcaaaccatggtgttatgccgggcttcaatatcttgaacagctttagcaaatctgggcaaaccattgttattttgttctcaaacattcaaaataatgctaaattgggccaagtgaacaataaaatataccagcttctaaatcaagaatgattggcgatcttcttttggatgaattgcattcggcacgtgaaaagaagactggcctgcaaacgttaagatggcaagcttgacaagtatttccgacacatttacaatgaagttgtaacatttgtttttttaacatgattgttaaaccatttaaacttgacaagggcgatgaacacactcattccctgtgaaggttctgtatgttgagaaaactagacaatgtacatgccgacactttttaagcaacaaccaagttcatagcaagaggaggtgaaagtatgaccccaattatgatggttctcatctccattttgctgattctactcggtttagttgttggctactttgttcgtaaaaccattgccgaagcgaaaattgcgggcgcacgcggtgcagccgagcaaattcttgaagatgcgaagcgtgatgctgaagcactgaaaaaagaagctctgcttgaagcaaaggatgaaatccacaaacttcgaatagatgctgaacaggaagttcgtgaaagacgaaatgagcttcaaaaacaagaaaaccgtttactccaaaaggaggaaaaccttgatcgcaaacatgagggaattgataaacgggaagcgatgttggagaagaaagatcattctctgaatgaacgacaacaacatattgaagagatggaaagcaaagtggatgagatgattcgtatgcagcagtctgagttggaacgaatttcgagtctaactcgtgacgaagcgaaacaaatcattcttgagcgggttgaaaacgagctttcacatgacatcgccatcatgacaaaagaaactgaaaaccgtgcgaaagaagaggcggataagaaagcgaaaaacattctttcactcgccttacagcgctgcgcagcggaccacgttgccgaaacaacggtatcagttgtcaatcttccaaatgatgagatgaaaggacgtatcatcggacgggaagggcgtaacattcgtacgcttgaaacgctgacaggaattgacctgattattgatgatacgcctgaagctgtcattctttccggatttgatccgatcagacgtgagacagccagaattgctcttgataaactcgttcaggatggccgtattcatccggcacggattgaagaaatggttgaaaaatctcgccgcgaggtcgatgactatattcgtgagatgggtgagcaaacgacatttgaggttggcgttcatggcctccacccagatctcatcaagatcctcggccgcttaaagttccgtacaagctacggtcaaaatgtgcttaagcattccatggaagtcgcattcttggccggtctaatggcatcggagcttggtgaagacgcaaagcttgctaaacgtgcgggtcttcttcacgacatcgggaaagcaattgaccatgaagtagaaggaagccacgttgagatcggggtagagcttgcgaccaaatataaagagcacccagtcgtgattaacagtattgcatcacaccacggggacgaggagccgacttccattattgctgtactggtagctgcagcagatgcgctttccgctgcaagacctggcgcaagaagtgagacgctcgagaattatattcgaagacttgaaaaactcgaagaaatttctgagtcctacgaaggtgttgaaaaatcatttgccattcaggctggacgcgaagtgcgaattatggtgaagccggattcaattaatgatcttgaggctcatcgactggcgcgagatatccgcaagcgaattgaggacgagctcgattatccaggtcatattaaggtgacagtaatcagagagactcgagccgtagagtatgcaaaataaagtgatgcgctaagcatcactttatttttttgacggcaaggaattttcaagaagaaaggatttacaaaatgagaattttatttatcggagatgttgtcggttcaccgggccgtgacatggtcaaagaatatgtaccaaagctaaaaacaaaatataagcctcactttaccattattaatggtgaaaacgccgcacatggaaaaggcctgacggaaaaaatttatcacagcttaatccagtccggggcagatgcaatcacaatggggaaccacacatgggacaaaaaagaaatatttgattttatagatgacgttccgaacttggttcgcccggcaaactttcctgaaggaacaccggggaaagggatcacatatgtgaaagcaaacggcaaagaactagcagtcattaatttgcagggacgtacgtttttgccgccgcttgatgacccgtttttaaaagcggatgaattgatcgcagaagccgcgaaaagaacaccgtacatttttattgactttcatgccgaagcgacaagtgaaaagctcgcacttggctggtacacggatggacgggcatcggctgtagtaggaactcatacacacgtgcaaacagcggataaccgcattttgccgaagggaacggcatatattactgatgtgggaatgactggcccgtatgacggtatactggggatggacagagagacgattattaagcgattcaaaacgaaccttccagtccggtttactgtcgctgaaggaaaaacaacgctcagcggagttgtcattgacattgacgatcaaacgaaaaaagccgtgaaaattgagcgtattttaatcaacgatgatcacatgttctttgaatagttgaacatatggttattttataaaaatattaaaaagaaaagcaggaatatagcaactccttagtgaatatagtaaaaatggaaggtagcccgctatttttgaaaagcattgtggggatggctttttggatagcaacatctaataatgattgttctaatgaacactcacttatccattgtaaaactaagggggagcagaaatggaaatcttaaaagtttcagcaaaatcgagtccaaattcagtggcaggtgcgcttgcaggcgtgttgagagagcgaggagccgccgagattcaagcgatcggagcgggtgcattaaaccaggctgtaaaagctgtggcgattgccaggggatttgtggcgccaagcggcgttgatttgatttgtattccggcttttacagatattcaaatcgatggggaagaaagaacagcgattaaattaatcgtggagcctcgctaaaaacaaataaagcattctcaacctgtttgcgtaatgcaaacaggttgtttttcatttattgtgatattttctcccgatagtatttttagcacataaatgagcgaatatacaaaatcagaaatgagctaaaacgtttcaaaaaaaatttccgcccatttttcaagacagatacttttgtccttctggaaaagacagtgctgtttacgcttattccatatcatggtacaatccgaatataacaagaatttttcaaggaggattgtacatgcagagtggaaagatgaaagctctaatgaaaaaggacggggcgttcggtgctgtgctgactgaagttcccattcctgagattgataaacatgaagtcctcataaaagtgaaagccgcttccatatgcggcacggatgtccacatttataattgggatcaatgggcacgtcagagaatcaaaacaccctatgttttcggccatgagttcagcggcatcgtagaggacgtgggagagaatgtcagcagtgtaaaagtgggagagtatgtgtctgcggaaacacacattgtttgtggtgaatgtgtcccttgcctaacaggaaaatctcatgtgtgtaccaatactgctataatcggagtggacacggcaggctgttttgcggagtatgtaaaagttccagctgataacatttggagaaatcccgctgatatggacccgtcaattgcttccattcaagagcctttaggaaatgcagttcataccgtacttgagagccagcctgcaggaggaacgactgcagtcattggatgcgggccgattggtcttatggctgttgcggttgcaaaagcagcaggagcttctcaggtgatagcgattgataagaatgaatacaggctgaggcttgcaaaacaaatgggagcgacttgtactgtttctattgaaaaagaagacccgctcaaaattgtaagcgctttaacgagtggggaaggagcagatcttgtttgtgagatgtcgggccatccctcagcgattgcccaaggtcttgcgatggctgcgaatggcggaagatttcatattctcagcttgccggaacatccggtgacaattgatttgacgaataaagtggtatttaaagggcttaccatccaaggagtcacaggaagaaaaatgttttcaacatggcgccaagtgtctcagttgatcagttcaaacgtgatcgatcttgcacctgttattacccatcagtttccgttagaggagtttgaaaaaggtttcgaactgatgagaagcgggcagtgcggaaaagtaattttaattccataaagggggataaacatgacgaaggaatttgagtttttaaaagcagagcttgatagtatgaaagaaaaccatacatggcaagacataaaacagcttgaatctatgcagggcccatctgtcacagtgaatcaccaaaaagtcattcagctatcttctaataattacctcggattcacttcacatcctagactcatcaacgccgcacaggaggccgttcagcagtatggagccggcaccggatcagtgagaacgattgccggtacatttacaatgcatcaagagcttgagaaaaagttggcagcctttaaaaaaacggaggcggcacttgtattccaatcaggcttcacaacaaaccaaggcgtactttcaagtattctatcaaaagaggacattgtcatctcagatgaattgaaccatgcctctattattgacggaattcgactgacaaaggcggataaaaaggtgtatcagcacgtcaatatgagtgatttagagcgggtgctgagaaagtcaatgaattatcggatgcgtctgattgtgacagacggcgtattttccatggatggcaacatagctcctctgcctgatattgtagagctcgctgagaaatatgacgcatttgtgatggtggatgacgcccatgcatccggagtacttggcgaaaacggcaggggaacggtgaatcacttcggtcttgacggcagagtgcatattcaggtcggaacattaagcaaggcaatcggagtgctcggcggctacgctgcaggttcaaaggtgctgatcgattatttgcgccataaaggccgtccatttttattcagcacatctcatccgccggcagtcactgcagcttgtatggaagcgattgatgtcttgcttgaagagccggagcatatggagcgcttgtgggagaatactgcctattttaaagcaatgcttgtgaaaatgggtctgactctcacgaagagtgaaacgccgattcttcctattttaattggtgatgaaggtgtggcaaagcaattttcagatcagctcctttctcgcggtgtttttgcccaaagtatcgttttcccgactgtagcaaagggaaaagccagaattcgcacgattataacagcagagcacaccaaggatgaactggatcaggcgcttgatgtcatcgaaaagacggcaaaggagctccagctattgtaacaagaggaagagtttactcttcctcttttgattccttattgattattattctcaatgagtgtacaatgataggttgccagttgtgcagagcttcaataacctttatactgaagggtggaagtttggtttgaaaggagaaaatatgacatgaatgaaaaacaaaaattagagagcggacaagttaatccatcggacaaaaaatccgagaaggattacagcaagtactttgaagctgtttacattccgccttctttaaaagacgcgaaaaaacgaggcaaggaagccgttacttatcataatgactttaaaatttctgaacaatttaaaggattgggagacggaagaaagttctatatccgtacgtacggctgccaaatgaatgaacacgatacagaggttatggcagggatctttagggcgctcggttacgaagcgacaaactctgttgacgatgccaatgtcattttgttaaatacatgtgcaatccgtgaaaatgctgaaaacaaggtgtttggtgagctcgggcacttaaaagcactgaaaaaaaacaatcccgatctgattttaggcgtgtgcggctgtatgtcccaagaggaatcagtcgtgaaccgtattttgaaaaaacatccgtttgtcgatatgattttcggaacgcataacattcatcgcctgccggagcttttgtcagaagcatacctttcaaaagaaatggttgtagaagtttggtctaaggaaggggacgttattgaaaaccttccgaaagtccgaaatggaaaaattaagggctgggtcaatatcatgtacggctgtgacaaattctgtacgtattgcattgtgccttacacacgcggaaaagaaagaagccgccgccctgaggatatcattcaggaagtgagaaggctcgcaagtgaaggctataaggaaattactctgttaggccaaaacgtaaacgcgtatggaaaagactttgaagatatgacgtacggacttggtgatttgatggatgaactgagaaaaatcgatatcccgagaatccgttttacaacgagtcatccgcgcgactttgacgaccgcctcattgaagtgctggcaaaaggcggaaatctgcttgatcacattcatcttccggttcaatcaggaagctcagaagttctcaagctgatggcccgcaaatatgacagagagcgttacatggagctggtgcgaaaaattaaagaagcaatgccaaacgcttctttgacaacggacattatcgtcggatttccaaatgaaacggacgaacagtttgaagaaacgctttctctataccgtgaagtggagtttgacagcgcctatacgttcatttactctccgcgtgaaggcactccggctgctaagatgaaagataatgtaccgatgcgtgtgaaaaaagaacgcctgcagcgtctaaacgcactggtgaatgaaatttctgctaaaaaaatgaaggaatacgaaggcaaggttgtcgaagtattagttgaaggtgaaagcaaaaataaccctgatattcttgcgggctatactgaaaaaagcaagcttgttaatttcaaagggccgaaggaagccatcggcaaaatcgtccgcgtgaaaatccagcaagcgaaaacatggtcgcttgacggagaaatggtaggagaagcaatcgaggtgaaataagatgacgctctactcaaaaaaagacattgtgcagcaggcacgaaaccttgcaaaaatgatctctgaaacagaagaggttgattttttcaaacgggctgaagcgcaaatcaatgagaatgacaaagtgtccacaatcgttaatcagattaaagccctgcaaaagcaggctgtcaatctgaagcattatgaaaagcatgaagcgctcaaacaagtagaagcaaaaattgacgcgctgcaagaagagcttgaagagattcctgttatccaggaattcagagactcgcaaatggaagtaaatgacctactgcagctcgttgcacacaccatttccaaccaagtcacaaatgaaatcatcacatcaaccggaggcgacctgctgaaaggggaaaccggttcaaaggtgaagcattcaaataacagctgttctctctaaacacggtgcctttacaggcccgtgtttttttatgtgtgggttatgaactaaataatctatgtaccaaatgttcaattggtttttctgtgcgcagccgcgtgtaaactttatcgcacttataagtaaagtttctaggctcacctgcatacaatggaacagaaactttgtatttttatattttatttataaaaatgcacactagacaaatgcccagcataagataacacgaagaagaacaaggaggcatgccggaatgtctgaatacagggaaattattacgaaggcagtagtagcgaaaggccgaaaattcacccaatgcaccaacaccatctcgcctgagaaaaaaccgagcagcattttgggtggttggattattaaccacaagtatgacgctgaaaaaattggaaaaacggtagaaattgaagggtattatgatataaacgtatggtactcttacgcggacaacacaaagacagaggttgtcacagaacgggtaaaatatgtagatgtcattaaactcagatacagagacaataattacttagatgatgagcatgaagtgattgccaaagtgcttcagcagccaaactgccttgaagtgaccatttcgccgaatggaaataaaatcgttgtgcaggcagaaagagaatttttggcggaagtggtaggggaaacaaaggtagttgttgaggtcaatcctgactgggaagaggatgacgaggaagattgggaagatgagcttgatgaagagcttgaagacatcaacccggagtttttagtgggagatcctgaagaataaaaaagggactaggggagacagtacccccaagtctcttttttatattgatatatcattcttttatcactttttgtttatgttataatgaaggttggaaaatagaaacgttgatacatagtgagggattaaacaatggccggttatacgcctatgatacagcaatatttaaaaataaaggcagagcaccaggatgcctttttattttttcgcctgggtgatttttatgaaatgttttttgaggacgccaaaaaagcgtcacaagagctggaaattacgttaacgagcagagatggcggtgcggctgaaaaaataccgatgtgcggtgtgccgtatcattctgcttccgcgtatatcgaacagcttattaaaaaaggatacaaagtggcgatctgtgaacagacggaagatccgaaagccgcaaagggcgttgtgaaaagagaagtggttcagctgattacgcccggaactgtaatggacggcaaaggcatccatgaatcggaaaataattttatcgcatctgtttcagcctgctcgaacggatacggacttgcgctgtctgatttaacaacgggagaaaatttggctgttttgattgaacggcttgaagacgtcatatcagaaatttattcagtcggcgcacgggaaatcgtggtttcaggaagcttggatgccgatacagtggcacagctgagagagcggtgcggtgcaacgatctcaattgaagatggagaaacagacgaacacgtaacgatcattgagcacttaaataatgaagatataacaaaaacatttatgcgcttatatacgtatttgaaaagaacccaaaagcgcagccttgatcatcttcagcccgtgcaggtgtatgagcttgaggaagcgatgaaaattgacttgtactcaaagcgtaatctggagctgaccgaaacgattcgttcgaaaaataaaaaaggctcccttttgtggctgctggatgaaacaaaaacggcaatgggaggccggctgcttaaacagtggattgaccggccgcttatcagagtcaatcaaatcgaagagcgccaagaaatggtggaaacattaatgtcccatttctttgaacgggaagatctgcgtgaacgtttaaaagaagtatatgacttagaacgccttgccggacgcgttgcattcggaaatgtcaatgcccgggatttgattcagctgaaggaatcgttaaagcaagttcctggcatcaaacagctggttgcttcactggctcatgacaaggccaaggaacgtgcagagcgcattgacccttgcggggatgtacttgaactgctggaagaagcgctgtacgaaaaccctcctttatcggtaaaagaagggaatctgattaaagatggttataatcaaaagcttgatgaatatcgtgatgcaagcagaaacggaaaagactggattgcccgcctggaacagcaggagcgggaatacacaggcattcgttctttaaaggttggctttaataaagttttcggttattacattgaagtgacaaaagcaaatttgcacttgcttgaggaagggcgttatgagcggaagcagacgttaaccaatgcagagcgctacattacacctgaattaaaagaaaaagaagcgctcattttagaggcggaaaataacatctgtgaactggagtacgagctgtttaccgagctgcgcgagaaggtgaagcagtatattccgcggctgcagcagcttgcaaaacagatgagcgagctggacgcactgcaatgctttgcgacaatcagtgaaaatcgtcactacacgaaaccggagttctctaaagatgaagtcgaagtgattgaaggcagacacccggttgttgaaaaagtcatggacagccaggaatatgtcccgaacaactgtatgatgggcgataacagacaaatgcttctcattacaggtccaaacatgtcagggaaaagcacgtatatgagacaaatcgcgctcatttccattatggcgcaaatcggctgctttgtacccgcgaaaaaagcggtgcttccgattttcgatcaaatttttacgcgaatcggcgctgcagatgatttgatttccggacaaagtacatttatggtagaaatgcttgaagcgaaaaatgcgattgtcaacgcgacgaaaaacagcctcattctgtttgatgaaatcgggcggggaacgtccacttatgacggcatggcgctggcacaggcgattattgaatatgttcacgatcatatcggcgccaagacgctgttcagcacacactatcacgagctgaccgttcttgaggacaagctgccccagctgaaaaacgttcatgttcgcgctgaagaatataacggaacggttgtctttcttcatcaaattaaagaaggtgccgctgataaaagctatggtatccatgtagctcagcttgccgaactgccgggagatctgattgctcgcgctcaagatattttaaaagagcttgagcattcaggaaacaaaccggaagtgccggtgcagaaacctcaggtgaaagaagagccggcacagctgtccttttttgacgaagcggaaaagccggctgaaacaccaaagctttcaaaaaaagaaaagcaagtgatcgatgccttcaaatcacttaatatactggatatgacaccgcttgaagcgatgaatgaaatgtacaagctgcaaaagaaattacattaaaacggggtgatgaatgtggcaaaagtcatccagctgtcagatgagctttcgaataaaatagcggcgggcgaggttgtggaacggcccgcctcagtcgtcaaagaattggtggaaaatgcgatcgacgctgacagcacagtcattgaaatcgatattgaggaagcaggccttgcatccattcgggtcttggataacggcgaaggaatggagaatgaagattgtaagcgtgctttccgccgccacgcaacgagtaaaataaaagatgaaaatgatttattcagggtgagaacgctcggtttcaggggagaagccctgccgagtatcgcgtcagtctctcatctggagattacaacaagcactggtgaaggagctgggacgaagctcgtcctccaaggaggaaacatcatttccgaatcgcgttcctcaagcaggaagggaactgaaattgtcgtttccaacctgttttttaacacaccggcccgtttgaaatatatgaaaaccgttcatacagagcttggaaacattacagatgtggttaaccgtattgctctggcgcatccagaggtatcgatccgcctgcgccatcatgggaaaaacctgcttcaaacgaacggaaacggagatgtgcgccatgtactggcagcgatttacggcacggctgtcgccaaaaaaatgcttccgctgcatgtgagctccttggattttgaagtaaagggatatatcgccctcccagagattacacgggcgtcgagaaactatatgtcgtctgtggtcaatggccgttacattaaaaatttcccgctcgtcaaagcggttcatgaaggctatcatacgcttctgccgatcggacgccatccgattacttttatagaaattacgatggacccgattttagtcgatgtcaacgtgcatccatcgaagcttgaggtccggctcagcaaggaaacagagcttcatgacttaatacgtgacggaattaaagatgtgtttaaacagcagcagctgattcctagtgcccaggtcccgaaaaaatcagcacctgccatcaaaaatgagcagcagtttataacctttgatgaaaagcctccggaaaaaaaagttccggaaaaatcgactgcgccatcttattcaccgatgaagctcagctcagtcgtaaaagagccggttgatgcggaggaaaaattgccccctctccaatttgatgctcctcctatcgttgatcaggaacaaacccttgaggtgtccgatgtttcagcagaacagcctgaaacatttgagcaggaatgccatgaggaacagccgcagccagcgtctgatcgggttccaattatgtacccgattggccagatgcacgggacttatatattggcacaaaacgaaaacggcctatatattatcgaccagcacgccgcccaagaacgtattaaatatgagtacttccgtgaaaaggtgggggaggttgagcctgaggtgcaggagatgattgtaccgctgacgttccactactccacaaatgaggctttgattattgaacagcacaaacaagagctcgaaagcgtcggtgtctttttagagtcattcggctctaacagttacatcgtccgctgccacccagcctggtttccaaagggagaagaagcagagcttatagaagaaatcattcagcaggtgctcgactccaaaaatatagatattaaaaaactccgcgaggaagcggcgattatgatgagctgcaaaggctccatcaaagcaaatcgccacctcagaaacgacgaaatcaaagcgcttctggacgacctccgaagcacatcagacccatttacatgcccgcacggccgcccgatcatcattcaccactcgacatatgagatggaaaagatgttcaaacgcgtgatgtagcgggggtggtaggcattgatccattctctgaatggatcaatgctttttttgtactccttcgagtgtcagattataagaaacggttgtaaacgtgtgagcagtgttaaagcattatacttcatggtccctccgtataacgaaatttccatttacaggcaattagaattaatgtatattttgggtgagggggtggaaacacatggcatgtggtccgaagatcattatctttttggatgaacttgatgatccgaatgtaagaatcattttagaatgcagaatttaaattacaacattgtgttttgctccctgttcgtgtgaacagggagttttttcgtttatataactggtgatgtccaaatataaggtgttatgaattctccatatctgccatcggcattttaagctgcttctctattaggctggtcatcaaaagcaagttcagtgaaagccatcactgctgatatcacaacaagcaagatatctggaatataaatagactgcataaagtaatctgcaaaacagatcgttataagattgctgataaaatacagtataaaagcaaaaagtgcagtctttttcaatgaaagtgattttgccaaaatgatagagataatctttgtgagtgggtctatgattaaacctacagcaaagcaggctaaaataaataaagctaatgtttgattggaagcgtatgtgatgcccagtatggagaataagcctttcatcccgaagaaaaagccgccgaagatgactgcaagcgcaatggccgcgataaaagtgatagatacaattccgattaattttgatctgaggttaaaatctttagagtgctcgttctgttctttatggttcaagtatgacactcccttcacctgcttactcatacaaacagcacccttgaatcagcccaaaatatctataagtctgttttctgacgaaaatagtatagcatattttaacaaaaccaaaaaaggccctttccactggggaagggcctttttcatcatgttaactcctgagattcgccgaagctttctctttttttggccaaataaaatagctggctgtaatgagaaagtcaattcctataatgacagtccacagtttaagaatgccgctcaacgcctcggttcgggaagagtcattgataaaatagatcatccctgccaatagtcccgcaccaattaagtaggccagcacatgtcttagccagcctttcgcaccgtgtttggcatgatccattccaaaacgtttcagcggttttgcgcctttttttgtcacataatattgaaatttttcatctgcccattgaatcatttgtttcccataagcgatcgatataccgatgtaaacagctgcaatcccatgggctgcggtcgctgaggctccgcggtaaaggtccacaccagttgccgctaacaagatcaaatcgataactggagttaaggcaaggaatagcagtcctaatgtatgtcgtttgaatacgtagcgtacagcaagccccaaaacaatgacaacccaaaacgcaatttcacagaaaacaatcatccatgcgataccgttcaatccattcccctcttttcaatacagttgtattatttaaataatatgttaccatctttgtttttgtaacacaactgtattataaaaattgccctctcatttttttcttgttacaataaagctatgccaaaacaaattgaccatgagaaaagaagaaaacaaattgcagaagcaacgtggcgcgtcattttagaacgagggatggagggagcatcagccagaaatattgcaaaggaagcaggattgtcattaggtgcgctgcgccattatttctctacacaggatgaattgcttgcttttgcaatgaaacttgtccaagaaaaggtgacggaccgaattaaggacattgcagtgagggatttgctccctaaggaaaaagtgttgcaaattttgcttgaaatggtcccgacgaatgaagaaacgattagagagatggaggtttggtttgcttttactgcttacgccagacataaaaaggatatgtttgatgcgaatcatgacgggattttcagcggcatgcggaatctgattgcctatttagatgaatccgatttactgaagccgaatgctgataaagacattgaagctgagagactttacgcgcttgttgacggcttggctttacatgccatgcttgaccctgtgcgagtgaataaagaccgaatcaagcgggtcattatgcagcatgtagagtcaatttgcgtggaagatacacgtgagacacaaaaacgtcatccttaaggcactagtgcgaaaagcgattcttgttgggcatgcgtccaaaagagtcgcttttttatattcaaagaacaaggatctctgaaaaaaatggaaaacgatcatgctgtttggtaaagtggaatgaaagacggactgaggagtgaacactggtccatcgtttaagaactttacatgatagggatggtataaatgaatcttacttacaaagtgcatccaattaaaacaaggtatcagggctggacgaattattgctatatcattgaagatattgtaagcagatctgcaattgttgttgatccctcatgggaattgagtaagataaccactacactttctgaactcgaagcggaattaaaggcagtcgcattgacacactctcattatgatcatgtaaatctggtagacccgctgacgaagatgtttaacgctcaagtttatatgtcaaaaaaagaaattgattattatcaattccgatgcagaaatttaattagcctagatgatcatcagacaatcagcataggaaacacaagagcacaatgtcttctcacaccggggcatacagccggcggaatgtgttatttgttttctgagagtatttttaccggagatacggtgtttacagaagggtgcggcatatgtgaggatgatggcagctctgcggaagagatgtttgatagtattcaaagaataaagtcggaggtttcacctcatgtacgggtgtatcctggtcactcatttggcaaatcgcccggtcattcgataaaggatctttatcagcataatatttactttcaaattgataaaaaagaatattttgtgaaatttcgcactcgtaaaaaccaaaaaggtatttttgattttaaataatccttctgaatctattatcctatttttcttcgaatatctaaatgatttttattttcaaaaatgattacatagaaggtgttatttattttgaaaactcatttgaaagaaaatgaagcgcattatcatgatatggcgccctatacgtgatctgggtcttttttcttatgttctgttatatctcctgatcctttattcctcaatggaaaaaagcagaaaaacaatcgagcaaactgtaggaaaaattaacttgacggataatatttacagaggttaccatcaacatgaacatgctactatttatccggtcatcactattataaaatcatacagaagtgaaatacatctactaatcggaagggtggctttgagagaatgatcacatatgtttttccaggtcagggttcacaaaaacagggaatgggcagcggcctattcgatgaatttaaagaactgacggatcaggcagatgagatcttaggatattctatcaaacgtctttgcctggaaaatccttattccaatttaaacaaaacgcaatttactcagccggcattatatgtggtaaacgcactaagctatctgaaaaaaatcaaggatgaagaagttaaacctgactttgtcgccgggcacagcttgggtgaatacaatgcgttatttgcagctgaagcctttgattttgagacaggtttacagcttgtcagaaaaagaggcgagctgatgagtctgataagcaacggcggtatggcagctgttatgggactaaatgaagagcaggttgcaaaggctctgaaagaatatcatttacatgatgttgatatcgctaatgtgaatgccccatatcaaattgtaatttcaggaaaaaaagatgagattgaaaaagccgcatctctttttgaaacgatgactgaagttacaatggtactccccttaaacgtaagcggcgcgtttcattccagatacatgaataaggcaaaagaagaatttgaggagttccttcatgccttttatttttcgcctccgtctatcccagttatttctaatgtgtatgccaaaccgtatacatacgaattcatgaaacagacgctggctgatcaaattaatcattcagtgaaatggactgacagtataagctacttaatgaaaaaaggccatatggagtttgaggaggtagggcctggaaatgttttaactgggttaattcatcgcataaagaaagatgcggaagcaatgcccagctaaagcatttgcccctatggccgtgcacctcatcaatcaggtctaaacacagatttcctttcatttaaggtataaagttttaaagattcaatcgttcgattgacactgtttctaattgaataactttatatactgttacataaagaggctgataaattaagttagacatttgaactatgtcagccggtctgtcaaaccatcgctcccacatctagatggtccattttttaaccgcacccaccaatcatagagtcgatgttctttgctgatcctgttatcatgttacatcaattttgagatatcaacatacatctacgatcacgtcataaatgaaccgcatccagagcaccaatagcaatccttccaagttgaatctcctttactttttcacatatgtcttttccgtttattaatttcatttcaatcgctgctatgtgctttaacaacatgcatggaaatgagaaatccaatagccgtcataaatataaaaaaagaaggttatacacatgaatgaaccgcttgtttttatgttttccgggcaaggttcccaatactatcacatggggaaagaactatttaaggaaaataccgtgtttcgtcaatcaatgcttgaaatggatgccattgcagcacggcgaatcggcacatccattgttgaagaaatctaccatccaggtaaacgtgtgtcagatccgtttgacagtattcttttttcccaccccgccatttttatgattgagtattccttatataaggttttggaagacaggggaatttatcctgattacgtattgggatcaagtctgggagaattcgcagcagcggcagtttctggtgtgtcagacgcagaggatatactggattgcatacttgaacaggctattatcatccaaaattcctgcgataaaggaaaaatgatggccattctggacaaaccgcaattgctgaatgattatccgcaactgtttggaaatagtgaactcatttctatcaattatgattcgcacttcgtcatttctggtgaagaagatcatataaggaagattatggaggatttaaaggagaagcagattctttgccagctgcttcctgtgtcctatgcctttcattcttcgcttattgatccggcagagagtgcctatgcagaatttttaagatcaaaatcttttcaaaaaccgtcaataccgattgtatcgagcttaacgggaagctgccttcacgtaatggacgagaatttcttttggaatgcggtcagaaagccaatgatgtttcgtgaagcgattcgatatttggaaagccagcatacatgcaagtttatcgatttagggccatccggcaccttagctgcttttgtgaaacagctgattccgggtgatgcagctgaccgttgctgctcaatcataacaccatttcatcaggagctgaaaaatctgaatacggttgagtattaccgtacaccagaaaggaagtttacaagatgattacatatgtctttccagggcaaggctcccagcaaaaggggatgggacaagggctatttgaacagtatcagcatttgacagatcaagcagatcaaatattgggctattcaatagagaagctatgtaccgaaaaatcatatctggatgtaaatcatactgaatacacgcagccggctttgtatgttgttaatgcactcaattacttgaagagagtggaggagaccggcagaaaacctgattttgcggcaggacatagcttaggagaatacaatgcgctgatggcagccggtgcctttgattttgaaaccggattaaggctcgtcaaaaaaagaggagaattgatgggacgaattacagggggcggaatggctgctgtgatcggcctgagtaaggaacaagttacagccgttttagaagagcaccgtcttcatgacattgatgtggcaaatgaaaatacgccccggcaaattgtgatttctggcccgaaaaaagagattgaaaaagctcgggctgtttttgaaagcaccaaggatgtaaagctgtttcatccattaaatgtgagcggagcttttcattccagatatatgaatgaagccaaacaggtatttaagcaatatattgactcattccagtttgcacctttggcgatcccggttatctccaatgtctacgcagagccataccatcaagacagattaaaagatacattatctgaacagatggacaacacagtgaaatggacggacagcattcgtttcctgatgggaagaggagaaatggagtttgaagagattgggcctggaactgttttaaccggtctcattcatcggattaaaaatgaagctgaaccattgacatatataccgaaaaagaaccccgcgatcagtgcgcatctaaaggagaaacgcaatgttcaagctgggattacggcagaatctttaggaagtgctgaatttaaacaagattatcatcttacatatgcttatcttgcaggaggaatgtaccgcggcattgcttcgaaagaaatggtagtaaagctgtcaagagcgggaatgatggggttctttggcacaggaggtctgagcctgaaagaggttgaagatgcgatccatgctatacaaggtgaattagggaaaggacaagcctatggcatcaatctggtccacaatatgaaacatactgaatcagaagaaaaaatgatcgatcttttattgaggaatcaagtgagcattgtggaggcttcagcatttctaagtgtcactcctgcattagtaaggtaccgcgcaaaaggagtgaaacgaaatcaaaatggtgacgttatatgctcaaatcgtctcatagcaaaaatatcacggccggaagttgcagaatcatttctgagtcctgcgcctgagaatatgctgcaaaagcttttaggagaaaataaaatcactatgaacgaagctgagttgttgcggtgcattccgatggctgacgatatttgtgtagaagctgattcaggcggtcatacagatggcggtgtggcatacagcctgatgccggcgatgacatctttaagagatgaaataatgaaaaaatatcaatttcggaaaaaaataagagttggtgcagctggagggattggaacacctgaggcagcgatggcggcttttatgctaggggctgattttattctaacaggctcaatcaatcaatgtacggttgaggcggcaacaagtgataaagtaaaggatttgcttcagcagatgaatgtacaagatacagcctatgcgcctgcaggtgatatgtttgaatcgggcagtaaagtgcaggtgctaaagaaaggcgtgttctttcccgcacgggcaaacaagttatatgaactgtaccagcggtatgggtctatacgtgagctggatgcaaagatgctggcccagcttgaggagaaatactttaaacgcagtatagaagacatatataaagatattgcattgcattatcccgcggcagacattgagaaggctgaacaaaacccgaagcataaaatggctttgattttccgatggtacttcagatacagctcaaaattggcaatcagcggaagcgaacattcgaaggtcgattatcaaattcactgcggtcccgcgctgggagcctttaatcaatgggttaaaggatcgcaattagaaaattggcgaaaccgccatgtggatgaaattgggaaaaaaataatgacagaaacggcagtattgcttcatgaacggatgcaatcgatgtatcagccgtcgcatgaaacagacaacataaaaatgaaagtttgaatattatgaaaaaatacctataaaaatcattaaaataatccctcgaaggagagagcgtattatggataaacagagaatctttgaagtactaatcaccaatatttgcgaggtgcttcctgaattagacggacacagatttgagcctgaagatcagctagttgagctaggagctgactctgtagacagagctgaaattatcacgatggtgctagaggatttatcgctaaaaattcctcgcattgagctatccggggtgaaaaacatcggtgaattagctgaggtgctttatgacaaagtgcaatctgcctgaggtggtggtgaccggtgtaggcgttacggcctccatcggtcaagggaaagaggactttgcttcctcgctgctgtccggcagacatgcctttgatgtcatgaagcgttcaggcagacaaaaagacagccggtttatcggagccgaaattgcgtcattgtcttatcctgaccgactctccaaaaaaatgttgcgaaaagcatcattctccagccgcgctgcattggtaactctcacagaggcttgggaggaggctgaattggacgatgcagattcctcacgtatcgggctggttgttggcgggtcaaattttcaacagagagaaaactttgaagtttatgaaaggtatcaagaccgctccggttttatttctccggcgtatggcctgtctttcatggacagcgatctttgcgggatatgtacagatcagtttggcatcacgggattagcatatacggtgggaggagcctcggccagcggccagttagcagtcattcatgcgattcagcaagtcctgtcaggcgaagttgatacttgcattgcacttggtgctttaatggatctttcttatatggaatgcgaggcgctaagggctttaggcgctatggggacggacaaatatgctgatgaacctgaaaaagcgtgccgtcccttcgatcaaaacagagacgggtttatctatggagaatcgtgcggtgcattggtaatagaacgaaaggagacggctttacgaagaggtcttaaaccttatgcagcattgtctggctggtcaatcaaactggacggaaaccggaatcctgatccttcattagaaggagagattcatgtcatccagcaggcactggagcgtgccaggcttttaccagaagatattgattatattaatcctcatggaacaggctcttttattggagatgaaatagaattaaaggcgctccgtgcatgccggctttcccatgcttatatcaatgcaacaaaatcgataaccggacacgggcttagtgcggcgggcatcgtagagattatttctgttttgctgcaaatgaaaaaatctgccctgcatccgagcaggaatttggatcatccaatcgatgattcctttcattgggtaaatgagaaatcgatttcataccgcatcaaaaatgcgctgagtttaagcatggggtttggcggaatgaacaccgcggtttgtatacaaaacattgagaaatgtggaggcgaatcataaatggtttcagccggaatagaagcgatgaatgtctttggcggaacggcataccttgatgtcatggagctggccaaatacagacacttagatactgcgagatttgaaaacttattaatgaaagaaaaagcggtagcactgccttatgaagatcccgtgaccttcggagtcaatgcagctaagccgattattgatgctttatctgaagcagagaaggaccggattgaattgctgatcacttgctctgaatccgggatcgactttgggaaatcgttaagtacatatatccatgaatatttaggtctcaaccgcaactgccgtttgtttgaggttaaacaggcgtgttattcagggacagcgggatttcagatggcggtgaattttatattatcccaaacttctccgggtgccaaagcactggttatcgccagtgatatttcacgttttttaatcgctgagggcggagacgctttaagcgaagattggtcttatgcggaaccgagcgccggagcgggagcggtggccgttttagttggcgaaaatcccgaggtgtttcaaatagatcccggagcaaatggttattacggctatgaagtgatggacacgtgccgccccattcccgacagtgaagcgggagattctgatctgtctttaatgtcatatttggattgctgcgaacagacctttctggaatatcaaaagcgtgtaccgggtgccaattatcaggacacgtttcaatatcttgcttaccatacgccctttggcgggatggtgaaaggtgcgcaccggacaatgatgcgtaaggtggcgaaggtgaaaacatccgggattgagacggattttttaactcgggtaaaaccaggtttaaactactgtcaacgagttggaaatattatgggggcagccttgtttctggcattggccagcacgatagaccaagggagatttgatacgcctaaacgaattggctgtttttcctacggatccggctgctgttctgaattttacagcggaattacaactccgcaaggccaggagcgtcagcgaacatttggtattgagaagcatttggatcgccggtatcagctctccatggaagagtatgagctattgtttaaggggagcgggatggtgcggtttgggacgcgcaatgtaaagctggactttgagatgataccgggcatcatgcagtccactcaagagaagccgcgcttgtttttagaagaaatttctgagtttcatcggaagtacaggtggatctcgtgacctatcaaacgataaaggtccgctttcaagcgtcggtttgctatattacctttcaccgtcctgaagcgaataatacgattaatgatacgctgatagaagaatgcttgcaagtgttaaaccaatgtgaaacatcaacggtgacggttgtcgttttagaggggcttcccgaggtgttttgtttcggagcggattttcaagaaatctatcaggaaatgaaaaggggcagaaaacaggcaagctcccaagagcctctctatgatttgtggatgaaattgcagaccggcccttatgtcacgatttcgcatgtcaggggaaaagtgaatgccggcggtcttggatttgtatctgccacagatattgccattgctgatcagacggcgtcattcagtctctctgagctgctattcggcctgtaccctgcttgtgttttaccgtttctgatccgccgtatcggccggcagaaagcgcattatatgacgcttatgacaaagccgatttccgttcaggaagccagtgaatgggggttaatagatgcttttgatgctgaaagtgacgtgctgctgagaaagcatttattgcgtttgcggaggctgaataaaaaaggaatcgcacattataaacagtttgtgagctcacttgatcatcaagtcagtcgtgcgaaagccaccgctttaactgcaaatcaagacatgttttctgatcctcaaaaccaaatgggaatcatcaggtatgttgaaacaggacaattcccatgggaggatcagtaaccgtttaaaaatgacaatcagaaccgttaggaggacatcatgacgcattctgttgtagagcttatcgaaattgaatccgccattattcaggtaaagatgcaagatcgcactcataaaaacgcgttttcacaagaacttacagacggtttaattcaagcgtttgaatacatacggcagaaccccaaatacaaagcggtcattttgacaggatatgataattattttgcttcaggaggaacgcaagaaggactgcttcgaattcaacagggattgaccaagttcactgatgacaatctttattctctggcgctggattgtgagattccagttattgcggcaatgcagggccatggaattggaggcggctttgtcatggggctctttgctgacatagtcattctgagcagagaaagcgtgtatacggctaattttatgaaatacggatttacgcctggaatgggcgctacctttatcgttcctaaaaaactgggtttcagcctgtcccaggaaatattattgaatgcgggcagctaccgcggagctgatcttgaaaaaagaggggttccttttaaggtgctgccccgtgcagaagtgttagattatgcagtggagctggcgcaagaactggcggaaaagccgagaaactcactggttacactgaaagatcatttggttgccccgcttcgcgatcagctgccgcgcgtcattgaacaggaattgatgatgcatgagaaaacatttcatcatgaagaagtcaaaagtagaatcaaaggtttatatggtaattaactgaaaatatataaaattttgcaggtgaaatggaggcagcgtgatgagaaataatgataatatccgcattttagctaatccttctgtcagtcatggtgagcctttacatatatctgaaaagcagccggcaacaatacctgaagttttatacagaacggcggcggagcttggggatacaaagggaatcatttatttgcagccggatggaactgaagtttaccaatcatacagacgattatgggatgatggactgcgcattgcaaaagggcttcgccaatcaggcctgaaagcaaaacaaaacgtgattttgcagcttggtgacaattcacagcttctccctgcgttctgggggtgtgtgttaacaggggttgttccggctccattagccgttccgccaacgtatgctgaatcgagcagcggcactcaaaagctgaaagacgcatggacgcttcttgataagccagcggtgattacggaccgggggatgcatcaggaaatgctcgattgggcaaaagaacaagggcttgaagggttcagggcaattattgtagaggatctgctcagcgctgaagcggacacagattggcatcaatccagtcctgaagacttagcgcttttattgctgacttcaggcagtacgggaacgcccaaagcagttatgcttaatcatcgtaacattatgagcatggtgaaagggattattcaaatgcaaggcttcaccagagaggatattacgtttaactggatgccgtttgaccatgtcggagggatcggaatgctgcatttgcgggatgtttatcttggctgtcaggaaattaacgtctcaagcgaaacgatcttaatggagccgttgaaatggctggattggattgatcattaccgagcttctgttacgtgggcgccgaattttgcgtttggtctggttactgattttgcagaagaaataaaagataggaaatgggatctgtcttcaatgcgatacatgctcaatggcggtgaagcaatggtagccaaggtagggcgcagaatacttgagcttttagaaccacatggactgcctgctgacgccatccgacctgcctggggaatgtccgaaacttcatcgggcgttattttttctcatgaatttacccgggctggaacaagtgatgatgatcattttgttgaaataggctctccaatccccggcttctctatgagaattgtgaatgaccataatgaattggttgaagagggtgagatcggccgttttcaagtctcgggtctttctgttactagcggttattaccagcggcctgatttgaatgagagtgtgtttacagaagacggctggtttgaaaccggagatcttggctttttgcgaaacgggcgcttaaccataacaggccgtacgaaagatgcaattatcattaacggcattaattattacagtcatgcaattgagtctgcagttgaagaattatctgaaattgaaacttcttatactgctgcttgcgctgtccgtctgggccagaattcaacagatcagctggctatcttctttgttacttccgcaaaattaaatgatgagcagatgtctcagcttcttagaaacatacaatcccatgtctcacaggtgatcggagtcaccccggaatatttgctgcctgtacaaaaagaagagattccaaaaacggctatcggaaagatccagcgcacccagctaaaaacttcatttgaaaatggagagttcgaccacttgctacataaacccaatcggatgaacgatgcggtccaggatgaggagatacagcaagcagaccatgtgaaaagagtaagggaagaaatacagaagcatctgctcacctgtttgactgaggagctgcatgtttcccgcgattgggtggagccaaatgcaaatatccaaagtcttggtgtgaattctatcaagatgatgaagctcattcgatcgatcgagaaaaactaccatatcaaactaacagccagagagatacatcaatatcctacaattgaacgcttagccagctatctatcagaacatgatgacctcagcagtttgtctgctgacaaaaagggcacggacacatataaaaccgaaccggaaaggagtcaggcaacttttcagcctctctctgaggttcaaaaaggattatggacattgcaaaaaatgtcacccgaaaaaagtgcatatcacgtacctctctgttttaaattttcgtcagggcttcaccatgaaacattccagcaggcttttggccttgtattgaatcagtacccaatcttaaagcacgtcatccaagagaaagatggagtgccatttcttaaaaatgagccggcactttcaattgaaatcaagacagaaaatatctcaagtttgaaagagtctgatattcctgcttttcttagaaagaaagtaaaggaaccgtatgtaaaggaaaacagcccgttagtgcgtgtcatgagcttttccagatctgaacaagagcattttttattagttgtcattcaccatttgatttttgacggagtttcgtctgtcacatttatacgcagtctgtttgatacctatcagcttcttttaaaaggacagcagccggaaaaagctgtttctcctgccatttatcatgattttgcggcatgggagaaaaacatgcttgccggcaaagacggtgtgaagcaccgtacatactggcagaaacagctatcgggaactttgccgaatcttcagctgcctaatgtcagcgcaagttcagtcgattctcagtttagagaggatacatacagcaggcggctgtccagcggcttcatgaatcaggtcagaacgtttgcgaaagagcattctgtaaatgtcacgacggtattcttaagctgctatatgatgctgcttggccgttacaccggccaaaaggaacagatcgtcggcatgccggccatggtgaggccggaagaaagatttgatgatgccattggacattttctcaatatgctcccgattcggagtgagctgaacccggcagacactttttctagctttatttcaaaattgcaattaacgatattagatgggcttgatcatgcagcatatccttttccaaaaatggtgagggatctgaatattcctcgcagtcaagcaggttcaccggtatttcaaaccgcttttttctatcagaattttcttcaatccggaagctatcaaagcttgctgagccgctatgctgacttcttttctgtcgatttcgttgagtatattcaccaagagggcgaatacgaattagtatttgaactgtgggaaacagaagaaaaaatggagctgaacatcaagtacaatactgggctgtttgatgcggcttctatatccgccatgttcgaccattttgtttatgtaacagagcaggcgatgttgaatccatctcagcctttaaaagagtattctttattacctgaggcagagaagcagatgattctcaaaacatggaacgccacaggaaaaacgtatccatatataacttttcatgagttgtttgagcagcaggcgaaaaagacgcctgatagagcggctgtcagctatgaaggtcaaacattgacgtatcgggagcttgatgagaaaagcacacagctggccatttatttgcaggcgcatggagtgggtcctgaccgtctggcggggatctatgtggatcgatcgctggacatgctagtgggtttattagcgatcctcaaggctgggggagcgtatgtgccgctagacccgtcctatccggctgaacgattagaatacatgcttgaggacagtgaagttttcattacactgacgacatcggaattagtaaatacgttgagttggaacggtgtcacaacagctcttttagatcaagattgggatgaaattgctcaaacagcctctgatcgaaaagtgcttacacgcactgtcacgccggagaacttggcatatgtcatttatacatccggcagcacaggaaagccaaaaggtgtcatgataccgcataaagctttgacaaactttctcgtttcgatgggggaaacaccaggtcttacggcagaggataaaatgcttgctgtcacaacctactgttttgatattgcagctctggaattatttttgcctttaataaagggcgcacactgctatatttgtcaaacggagcatacaaaagacgttgaaaaactgaaacgggacatccgcgcgatcaaaccgacagtgatgcaggcaacccccgctacgtggaagatgctcttttattcaggctgggaaaatgaagagagcgtgaaaattttatgcggtggcgaagcatttcctgagacattaaaacgatatttcttagatacgggcagtgaagcctggaatatgttcgggccaaccgaaacaactatctggtcagcggttcagcgcattagcgatgaatgctctcatgccacgataggaaggccaatcgccaatacacaaatctatattacggattctcagctcgcgccagtgccggcaggtgtcccgggtgagctgtgcattgcaggagacggtgtggcgaagggctactacaaaaaggaagaattaacggattcgagattcattgacaacccttttgagcctgggtctaagctttatagaacgggagacatggcccgctggcttccgggagggcgaattgaatatataggccgcatcgataatcaagtaaaaatccgcggattccgtattgaacttggtgatattgaaagcaggcttagtgagcatcccggcattctggaatgcgttgtggtcgcagatatggataacctagctgcctattatacagctaaacatgcaaatgcttctctcacagcgagagagctgcgtcattttgtgaaaaacgctttgcctgcctatatggtgccttcttattttattcagcttgatcatatgccgttaactccgaacggaaagatagatagaaacagccttaagaatatcgatttatcaggggagcagctaaagcaaaggcagacctctcctaagaacattcaggatactgtttttaccatttggcaggaagtgctgaaaacgagtgacattgaatgggatgacggatttttcgatgtgggcggggattcgcttctcgcggtcactgtggctgatcgcatcaaacatgaactatcctgtgagttttctgtcacagacctgtttgagtattcaaccattaaaaatatcagccagtacatcactgaacagcgaatgggcgatgcaagtgaccatatgccgacagacccggcagctcatatagaagatcagtctaccgagatgagtgatctcccagactattatgacgatagtgtagcgattattggcatatcgtgtgaatttccaggggcaaaaaatcatgatgaattttgggagaacctcagagacggcaaggaaagcatagcgtttttcaataaagaagagcttcagcgctttggcatttcaaaggagatagcggagaatgccgactatgtcccggctaaagcttcaattgaggggaaagacagatttgatccaagcttctttcaaatctctcctaaagacgctgaatttatggaccctcagcttcggatgctgctgactcattcatggaaagcaatagaagatgccggttatgctgcgagacagattccgcaaaccagtgtttttatgtcggcaagcaataattcttatcgcgcgctgctgccgtcagatacaacagagagcctagagacgccggacggctatgtttcgtgggtgcttgcacagagtgggacgatcccgacaatgatttctcataagctcgggctgagagggccaagctatttcgttcatgccaactgctcatcatctctgattggattgcattctgcctataaaagcctcctgtcgggtgaatctgattatgctttagttggcggtgcaacgctgcataccgagtcaaatatcggatatgtgcatcagcctgggctgaacttttcgagtgatggacatattaaagcttttgacgcttcagctgacggaatgataggcggtgagggcgttgctgttgtattgctgaaaaaagcagctgatgctgtaaaggacggggatcatatctatgccttgctgagaggcattggtgtaaataacgacggcgctgacaaagtcggcttttatgctccaagcgttaaaggccaggctgacgtggtccaacaggtcatgaatcaaacgaagatacagcctgaatccatctgctatgtagaagcacacgggaccggaacgaagctgggggacccgatcgagctggcggctttaacaaacgtttacaggcaatatacaaataaaacgcaattttgcggcattgggtcggtgaaaaccaatatcggacatttagatacagccgccggtcttgcgggctgcattaaggttgtgatgagtctttatcatcaagagcttgcaccgagtatcaattataaggagccgaatccaaatacagacttagccagctctcctttttacgtcgtcgatcaaaagaaaacgttaagccgtgagatcaaaacgcacagggctgcacttagctcgttcgggcttggcgggacaaatacccatgccatttttgaacaattcaaaagggattcagataagggaaagatagacggaacctgcatcgtcccgatctcggcgaaaaataaagagaggctgcaagagtatgcagaagacattctggcctatttagaaagaagagggcttgagaacagccagctgcctgattttgcgtatacccttcaggtggggcgcgaagcgatggagcatcgcgttgtctttattgccgatcatgtaaatgagttaaaacagaggctcacagattttatcaatggtaaaacagcgattgaaggctgttttcaaggaagtaagcacaatgcaagagaggtttcatggctgacggaggatgaggacagcgctgaactcatacgtaagtggatggccaaaggaaaagtaaacaagcttgcagaaatgtggagcaagggagcgaatatagattggatgcagctttacaagggtgagcgcccaaacagaatgagtctgccgacttatccatttgcaaaggaacgatactggccgtcgcaggatgaccgcaaaccggtggcgcagatatccggaaatcagacagggatcggctctattcatccattgcttcatcagaatacatctgatttttctgaacagaaattcagttcggttttcactggtgacgaatttttcctgagagaccatgtggtaagaggaaagcctgtgcttcctggtgttgcgtaccttgaaatggcgtacgcggctataaaccaggcggcaggaagtgaaattggccaagatgtcagaatcagattgaatcatacagtctgggttcagcctgttgtggttgacagacattcagctcaagtggatatcagtctcttccctgaagaagatggaaaaatcacctttgacatttacagtacacaggaagacggggacgaccctgttattcatagtcaaggcagtgcggagctggcatctgccgccgaaacgccagtcgcagacctcactgaaatgtcacgccgctgcggcaaaggaaagatgtcgcctgatcaattttacgaagaaggcagaagcagaggaatgttccatggtccggcctttcaaggaattaagaatgtgaatataggaaacagagaggttttggcgcagctgcagcttccggaaatcgtttctggaacgaatgaacagtttgtgctgcacccaagtatcatggactccgccttgcagacagcaacaatatgcatcatgcaggaattgacggatcaaaagctgattttgccatttgcgcttgaggagcttgaggtgatcaaagggtgttcttcttctatgtgggcttatgctcgcttaagtgacagcgatcactccggaggggttgttcagaaagcggatatcgatgtcattgacgagagtggaagcgtatgtgtcaggatcaaaggattctcaacgagagtattagaaggggaggttcatacttcaaagccttcaacacggtacgaacgcttaatgcttgaaccggtgtgggaaaaacagaatgaagaacgagaggacgaagatccttcgtacacggagcatatcattgttctcttcgaaactgaacgaagtgtcacagacagcattgcctcccacatgaaagatgtccgtgtgattactctaaacgaagctgaaggacatattgctgaacgttatcaatgttacatgcagaacatttttgaactcctgcaaagcaaggtccgtgaactttctgcaggccgtatcatcattcaagcgattgttccgctggaaaaagagaagcaattgtttgccggcgtttccggtctgtttaaaacagcagaaatagagttcagcaaactgactgctcaggtcatcgaaattgagaaacctgaagagatgatagaccttcacctcaagctgaaagacgacagccagagaccatttgacaaacagattcgatatgaggctggacaccgttttgtgaaaggctggagggaaatggtgcttccttcagctgatatgcttcacatgccgtggagagacgaaggcgtttatctaatcacaggcggagcaggaagcttaggccttctgtttgcaaaggaaattgccaatcgaactggccggtctactattgtgctgacgggacgatctgttttaagtgaggataaggaaaacgagctggaggctcttcgaagcatcggagcggaggttgtctatcgggaggctgatgtaagtgatcagcatgcggttcgtcatcttttggaggaaatcaaagaaagatatggcactctcaatggaattattcacggtgcaggcagcattaaagatcgcttcatcattcataaaacgaatgaagagtttcaagaagtgttgcagccaaaagtgagcgggttgttacatgtagacgaatgcagcaaggatttcccattggactttttcattttcttctcttctctttcgggatgtttaggaaacgctggacaagccgattatgcggcagccaattcgtttatggatgcatttgctgaataccgccgttctcttgcggcatcaaaaaagagattcggctccaccatttccttcaattggccgttatgggaagaaggcggtatgcaagtcggcgctgaagatgaaaagagaatgctgaaaacgacgggaatggtcccgatgccgacagatagtggcttgaaagcattttatcaagggatagtatctgataagccgcaagtttttgtgatggaaggacagcttcagaaaatgaagcaaaaactgctttccgcaggatcgaaagccaagcggaacgatcagagaaaggcggatcaggatcaaggacaaactagaaaattggaagcagccttaatccaaatgattggcgcaattttgaaagtaaacactgacgatatcgatgtcaacacagagctgagtgagtacggattcgactcagttacattcactgtctttacaaacaagatcaacgaaaaatttcagttggagctaacaccgaccattttctttgaatatggtagcgtccaaagcctggctgaatatgtagttgctgcgtatcagggcgaatggaatcaagatgctactgctaaaggcaaagatgaaagaacaaacttagtgcacagtttaagcagcctggaggcatcattaagcaacatggtcagtgcaattttaaaagtaaatagtgaagatattgatgtcaatacagagctgagtgaatacggatttgattccgttacatttacggtctttacaaacaagattaacgaagaatttcagttggagctaacgccgaccattttctttgaatatggaagtatccaaagcctggctgagtatttgactgctgaacatgaggacaccctggttcaggagcgcgaaaaaccagaggggcaggaagagttacagacaaaatcccctgaagcgccgaaaatcacatcacgtagaaagcgccgctttacacagcctgttattgcaaaagcagaaagaaacaaaaagcaggctgccgattttgagccggttgcaatagtcggcatcagcggccgattccctggcgctatggatatagatgaattttgggaaaacctagaagaagggaaagacagcatcacagaagttccaaaagatcgatgggattggcgggagcattatggaaacccagacactgacgtcaataaaaccgacatcaaatggggcggatttattgacggtgtcgctgagtttgatccgttgttttttggtatttcgccgcgagaagctgattatgtagaccctcagcagcgcttgttaatgacatacgtgtggaaggcactggaagatgcgggttgctcgccgcaaagcctttcgggtacagggaccggtatctttatcggtacgggaaacaccggttataaagatctattccatagagcgaatcttccaattgaaggccatgctgctacaggtcatatgattccttcggtaggcccgaatagaatgagttattttttaaatattcatggtccgagcgaaccagtagagacggcctgttccagttctcttgtagccattcaccgtgctgtgactgcgatgcaaaacggtgattgtgagatggcgatcgctggaggcgtgaatacgatcttaaccgaggaggcgcatattagctacagcaaggcgggtatgctcagcaaagacggcaggtgtaaaaccttctccgccgatgcgaatggctatgccagaggcgaaggggtcggaatggtcatgttgaaaaagctggaagatgccgagcgcgacggaaatcatatttatggcgttattcggggcacggcggaaaatcacggcggaagagccaataccctgacatcgcctaatccgaaagcacaagctgatttgttggtgcgtgcatatcgccaagcaggcatagatccaagcactgtcacatatatcgaagcacatggaacagggacggaattgggcgatccgattgaaataaatgggctgaaagccgcgtttaaggaactatccaatatgaaaggcgagagccagccggatgttccggatcaccgttgcggcatcggctcagttaaaagcaatatcggtcatttagagctagcagccggtatttccggtttgatcaaagtgcttttgcaaatgaagcataaaacgttagtgaaaagcctgcattgcgagacgcttaatccttatcttcagctgacagacagtccgttttacatcgttcaggaaaaacaggaatggaagtctgtcacagatcgtgacggaaacgagcttccgcgccgtgccggaatcagttcgtttgggattggcggagtaaacgcgcatattgtggttgaagaatatatgccaaaagccaattcagaacacacggctacaggacagccaaacgtgattgtgctgtcggctaaaaataaaagcaggctgatagatcgtgctttgcaattgcttgaggcgatccgcaataaaaaatatacagatcaggagttgcaccgcatcgcttacaccctgcaggtcgggcgcgaagaaatggatgagcgtctggcgtgtgttgcggggacaatgcaggaacttgaagagaaactgcaggcgtttgttgacggtaaggaagaaacaggcgaatttttccggggacagtctcatcgaaataaagagacccagactatatttacagcagatgaagatatagcgttggcacttgatgcttggatcagaaaaagaaaatacgccaaacttgctgatttatgggtcaaaggggtctcaatccagtggaacacattatacggagagaccaaaccgcgcctgatcagcctcccttcatatccgtttgcgaaggatcactattgggtgccgacaaaggaacattcagaaagagacaaaaaagaactggttaatgcgattgaagatcgggctgcatgctttttgacgaaacaatggagtttgagtccaattggctcagcagtgccggggacaagaactgttgccatcctgagcaatcaagagacagcagatttagcagcagaagtgtcttcgtattttccgaatcatctcttattagatgtgagccggatagaaaatgatcagtcagacattgattggaaagagtttgacggcctagtggatgtcatcggatgcggtaaggatgatgagggccggctggattggattgaatgggtgcaaagactggttgaattcgggcataaagaggggctcaggctgctttgtgtgacgaaggggctcgaatcgtttcaaaacacatctatccggatggctggcgcctcacgggctgggttgtatcgaatgctccaatgcgagtacagccatcttatatcaaggcatatggatgcagaggaggttactgatcatcgccgtctcgcgaagttgatcgctgatgagttttattccgattcttatgatgcggaggtttgctacagggatggtttacggtatcaagcttttctaaaagctcatccggaaacaggtaaggccacggaacagagcgcggtcttcccgaaagatcatgtgcttctcattacaggcggcacacgaggcatcggactattatgcgcccgtcattttgcagagtgctatggagtgaaaaaactggtgctgaccggacgagaacagtttcctccgcgagaggaatggactcgttttgacacctcgaacacatcagttgcccagaaaatccaggcagtgcgggagctggaagcgaagggtgtacaggtggagatgctgccgctgacgttatctgatgatgctcaggttgagcaaacgttgcaacatatcaagcgaacattaggaccgattggcggtgtcattcattgtgcaggtctgacggatatggatacgctggcatttatccgaaaaacttcagatgatattcagcgggtgctggaacctaaggtgtcaggtcttacaacgttatatcgccatgtgtgtaacgagcctttacagttttttgtcttattttcttctgtttcagccattattccggagctttcggcgggacaagctgactatgctatggccaatagctatatggattattttgcagaagcacatcagaaacatgcgccgatcatcagtgttcagtggccgaactggaaagaaaccggtatgggtgaagtgacaaatcaagcgtatcgggaaagcggcttgttgagcattacgaattcagaaggcttacgttttctagatcaaattttatcgaaaatgttcggaccggttgttctccctgcgatggcgaatcaaacaaactgggagccggaactgctgatgaagaggaggaaaccgcatgagggcggtttgcaggaagctgctttacagagcccgccagctagagacattgaagaggccgatgaagtttccaaatgtgatgggttattatctgaaacacagtcctggcttgttgatctgtttaccgaagagctgagaatagatcgtgaagacttcgagattgacggggtgtttcaggattatggcgtggattcgatcattttggcacaagtgctccagcgtataaaccgcaaattagaagcagcactcgatccatcgattctatatgaatacccgacaattcaaaggttcgcagattggctgatcggttcttattccgaaaggctgtccgctttattcggaggcaggatatcggatgcatcagcacctttggagaacataatattggcggaggcagctgttcctgcggaggatcgagctcttacacctcagattcaggcgccagcgattttgtcaccggactctcatgcagaaggtattgccgttgtcggactctcttgccgattccctggggcagatacattggagtcatattggtcgttactatccgaggggcgttcgtcaatcggcccgattccggcagagcgttggggctgtaagacgccatattatgccggcgtgattgatgacgtcagctattttgatcctgatttctttttgcttcatgaagaagacgtaagggcgatggatccgcaagcactgctcgtattggaagagtgtctgaaactcttgtatcacgccggttatacgcctgaggaaataaagggaaagcctgtcggtgtttatatcggaggcagaagccagcacgaacctgatgaagagagccttgatcatgccaagaatccgatcgtgacagtcggccaaaattatttagcggctaatctttcacaattttttgatgtccgcggcccgagtgttgtagttgacaccgcatgctcgtcagctttggtcggcatgaatatggccattcaggcgctgcgtggcggagatattcaatccgccatagtcggcggtgtcagcttgctgagctcagatgcctctcacaggctgtttgaccggcgcggcattttaagcaagcattcatccttccatgtgtttgatgagcgtgctgacggagttgtgttaggtgaaggcgtcggaatggtcatgctaaaaacggtaaaacaggcgctggaagacggagataccatatatgctgttgtgaaagcggcctcggtcaataatgacggaagaacggcggggcctgcaacacctaatctggaggcgcaaaaggaagtcatgaaagatgcgctttccaaaagcggaaaaaaaccagaggacatcagctatcttgaggcaaacgggtcaggttcaatcgtaaccgatctccttgagctaaaagcgatccaatcagtgtaccgttctgggcactcatcgcctctttctcttggctcaatcaagccgaacatcgggcatccgctatgtgctgaagggatcgccagcttcattaaggttgtgctgatgctgaaagagcgccgctttgtcccatttttatcaggtgaaaaagagatggcgcatttcgatcaacagaaagcgaacatcacgttcagccgagccctggaaaaatggacagattcgcagcctactgcggctattaactgctttgccgatggggggacgaatgcccatgtcatcgtagaggcgtgggaaaaagatgaaaaacacgccatcaagcgcagtccaatatcgcctcctcaattaaagaaacgaatgctttcgccaggcgagacaaagctggaagcggagacttcgaaaatgactgcggcaaacatatgggatacttatgaggtggaggtctaacgtgaaaaagataacgaaacaactcacattatcgttaaaaaatccgtttatttatcaccatgtggtttacggacaaaatgtcctgccgggattggcttatatcgatataatctaccagatattcagagaacacggcttctcctgctcagagcttcagctgcggaatttatccatctatcagccattgacggcggaacaggatgcagtaattgttctgaatatccaatgcgcggagaaaaaagaaggacagtggcaaatcacagccaagggaactgaaaaacgtgatgggaaagaagcttcagaagaaaagctctatatgaaggctgatatgtacgcagactccccagccatatttgaagaaacactggatctcagtcaaatcaaagcatctgcacagaacgttgttcagcttgatgatgtatatgaacaatgcagacgtcaggaattggtgcacagcgaatatatgaaagcaaaaggctgcatctatgaagaggaagatggcgtccttcttgagctttctctcggttcggaagccatgcttcacgcagaaggctttatgtttcacccgactctcatagacgggagcggggtgggtgccaatcatttgctcacatctttgcttaaaggagaacagaggctgtatttgcctctgttctatgaatccttttccgcttctgcacttttgcagtcgaattgcatgacgagaattaagcgctcctccgtccggcgggaaaaagagctgatttatgtaacacttgaattttttaatgcgtcgggagaaaaagtggctgagttgaaaaactttacaagcaaattggtgcgagaagcggagctgattagcggaaaacatcaagatgcacaggagacacagatgacaagagcggacactgctgagcgtgataaacctgctgacatggtatcttctcccgttaattcctatagtgaggctgaacagttcgtaagccaattaatcgcagagaaaatcaataagccggtagaacaagttgaaaaacaggtcggttattaccaaatgggactgaattcatcgggcttgcttgaggtggtagaaacgatcagtgataagatcggtgagagcctttcgccgactcttctgtttgagcataccaccatagcggaactgtcagcgtttcttgccgaggaatatgctgagcattttagtgccgctggttcccttggccttggccagaatgaaagagcacgcgtttccgacagcataaacgaccgtaagactgttgaagcttctcgtcctgcacctattgaggcagcaggcgatattgcgattatcggcttggcgggcaggtatccgaaggcagccaatattcatgaattttggaacaatctgaaagaggggaaggactgcgttagcgagattcctgagtcgcgctgggattggcagaaacttgaaggaatcacatctccttcgggtaaggacatttccaaatggggaggatttattgatgatcccgactgctttgatccccaatttttcagaatcacgccaagagaagcggagacaatggaccctcaagagcggctgtttttagaaacatgctgggaaacgattgaggatgcgggctatacgccaaagacgttggccaagcctaaaggacgaaataaaaggcagcatgtaggagtttttgccggtgtcatgcacaaggattatacattagtcggagctgaagaagcatcagcagaaaatgtgtttcctctttcgctcaactatgcgcaaatcgccaaccgtgtttcttacttttgtaatttccacggtccaagtatggctgtcgatacggtatgttcatcctctttgaccgcagtgcacttggcgttggaaagcatacgtcacggtgagtgcgatgttgcgttagcaggcggagtgaacctgtctttgcacccgaataaatatatgacatacggggtctgggatatgttttccactgacggacactgccgtacgtttggaaaggatggagacggttatgtgcctgcagagggtataggcgcggttttattaaagcctttgcgccaggcagaggaagacggagatcgcatttatgcagttattaaaggaagtgctgtgaatcatgtgggcactgtaagcggcatttcagtgccgagccctgtttcccaagctgatctgattgagacatgcttggagaaaacgggaatcgatccgcggacgatcagttatgtggaagcccatggaaccggcacgtccttaggagatccgatcgaaatacagggattagtgaaagcgttccgccaatatacgcaggatcggcagttctgttcaatcggttctgtaaagtcaaacattgggcacgccgaatccgccgcggggatcagcggtttaagcaaggttgctcttcagcttcaccatcaaaaacttgtgccttctttgcattcggaagaactgaatccgtacgttgattttgaaaagtctccattttatgtacagcatgaaacagaaacgtggaagcagcctgttatcaaggagaatggggaagacgtcccttatccgcgacgggcggggatcagttcttttggcgcaacaggttcaaacgcacatattatccttgaggaacatattcctcaagcagcggagcaggacgtttctttgtcctcagattctgacatatccgcagttattccgctttctgcccgtaatcaagaacgtctccgtgtatatgcaaaacgtctcttggattttcttcatgatgggattcagattagagatttggcgtatacattgcaggtaggccgtgaaccgatggaagaacgggtttctttcttagcatccggaattcaagaattgagcgaccaattgaaggcttttatagaaggacgaaaagccattcagcattgctggaagggccgcgtgtcaagaggaagcgaaccatcgcgtcccgccgaatcggtacataaattgctggagcaaagaaaactcgatcagattgcggagcagtgggcgaacggatctggtgttgactggaagctgctttacgagggaagcaaaccaaagcggatcagcctgccgacttacccatttgagagggtgcgttattgggtgccgaaagcggagaaaaagactgatcgttcaaaacaggagcggcacatcctgcatcctcttctgcatcaaaatgtgtccgacatatcgggtgtccgcttccgttcagcgtttacaggacgtgaatttttcttgaaggatcatgtcataaagggcgaacacgttttacctggcgcagctttattggagatggttcgggcagctgtggaaagggcagctgcggatcagttcccgacaggattccggctccggaatatcgtctgggtccggccgttcgccgtcacggaacagcagaaagatatagatgtacgtctatatcctgaggaaaatggtgagattacatttgaaatctgccgggaccctgaaagcgcagaggagtcgccgattgtatatgggcaagggagtgcagtgctttgtgaggctggtgaaaatccggttatcaacattgaagaattgaaggcaagctataatggccggacgctgtcaccttttgattgctacgaggcttatacagaaatgggtattcattatggtgacagccacagagcgatcgacagcctatatgccggcgaaaacggagttctagtgaaattgacgatgcctcctgtaatctctgatacagaagaccattatattctgcatccgagcatgatagattcggcatttcaagcatctatcggtttgaggctgggaggagctacgagtttagaagacagaaaggcaatgctgccttttgccatacaggatgtccaaatcttcaaaggctgcgaggcatctatgtgggcgcggatcacatatagcgagggcagtacagctggggatcgtatgcagaagcttgatatcgatttatgcaatgaagaggggcaggtttgcgtgcgattgacgggctattctgcaagagtgttagaaacaggtcaagaagatccttctgaagcgactgacacgctattgttcgaacatatttgggaagaacgtgctgcagagaggaaagagctcatagagtacgacacacataaagtcgttatctgtgatgttggagaacaaatggaaagcctccaaaatcatcttgactgtacagttctgcagcatgatacagagacaattgatgaacggtttgaaggttatgccatacagttatttgaagaaatcaaacagctaatgcactcaaaaacagggggacatacattcattcaagtggcggtgcctgcgttggacgagcctcagctattaagcggcttaactggattgctcaaaacggctgaactggaaaatccaaaactgacaggacagttgatcgaaatagagaccgggatgtcagctggtgacctattcgaaatattggaggaaaacagacgctatccgcgtgacacgcatatccgtcactggcaagggaagcgatttgtaagcaagtggaaagaagtgtctggtgagcacctaagagctgatatgccatggaaggataaaggcgtgtatctgatcacaggcggtgcaggcggtcttggattcatctttgcaactgaaattgcgaaccaaacgaatgacgcggttgtgatcctgacaggacgctctccgcttgatgaaaggaagaagaagaagcttcaagccttacagaaacttggcatccaagcgatttacagacaagctgatctggctgacaaacaagcggttgatgccttattaaaagaaacccaaaacgtttacggagacttagatggcatcattcatagcgccggtttaataaaagataatttcattatgaagaaaaagaaagaagaggttcaaaccgttcttgctccaaaggtcacaggactggttcaccttgacgaagcaacgaaagatattccgctcgatttctttatccttttttcctcaggtgccggagcagtaggaagcgcgggacaggctgattacgcaatggccaatgcatttatgaatgcatttagcgaatatcgtaatggccaagcagagctgcacaagcgttacggaaaaactctttcagtgtgctggccgctgtggaaagacgggggcatgcaaattgatgcggaaactgcaaggatgctgaaaagagaaacaggcatggtggccatggaaacagatcgtgggattcaggcgctatatcatggctggacgtcagggaacccgcaagtgttagttgcttccggtgttactgatcggattcgtgcatttttacatgaaacgggacatggcaaaggccaatctcacaatatcaaaaaaagcagtctcaatcaggaggcagaaaaagcagacatcattggggaaattgatgaagagatactaagagaaaaagcggagaactattttaaacaggtgctttcttcggtgattaagctgccagctggccagattgatgctgaagctcctctcgaggattacgggatcgattctatcatgatcatgcatgtaacgggtcaattagaaaaagtattcggatctttgtccaagacgctgttctttgaataccaggatattcggtcattaacccggtattttattgattcccgcagagaaaaactgctggacatcttgggatttgaaacgggaaaaccttctgttgaaagaaaatcagaacctgaaaaacaagaaatcccagttatcccaagaaagtctggatttcttcctttgcaagataaagagcagaagcaggtaagagagaaggaaacggaagaaattgcgatcatcggtatctcaggtcgctatccgcaggcagacaacattgatgaattatgggaaaacctgagggacgggcgagactgtattacggaaattcctgcagaccgctgggatcacagtctttattatgacgaagataaagacaagcctggaaaaacctacagcaagtggggcggcttcatgaaggatgtagacaagtttgacccgcagtttttccatatttcgccgcgtgaggcaaaattaatggacccgcaagagcgtttatttttgcagtgcgtgtatgaaacgatggaagacgcaggctatacaagggagcatctcggccgtaagcgtgattcggagcttggcggaagcgtcggtgtttacgtcggtgtcatgtacgaagaatatcagctgtacggggcacaagagcaggtgcggggaaggtctctggctttaacgggaaatccatcatccatcgcgaaccgagtatcttattattttgattttcacggaccgagtattgctttagacaccatgtgttcttcttctttaacggctatccacttggcctgccaaagcctgcagcgcggagagtgtgaggcggcattcgcgggcggcgtgaatgtgtcaatccatccaaataaatatttgatgctcgggcagaacaaatttatgtccagcaaaggccgatgtgaaagcttcggacagggcggagacggctatgtgccgggggaaggcgttggagcagtgcttctgaagccattgtctaaagcagttgaagatggtgatcacatttatggaatcattaaggggacagccattaaccacgggggaaaaacaaacgggtactcagttcccaatccgaatgcccaagcagatgtcatcaaaaaggcgtttgtggaagcgaaggttgacccgtgggcagtcagttacatcgaagcccacggcacgggaacctctctcggtgatcctattgaaatcacagggctgtccaaagtgtttacgcaagaaaccgatgacaaacaattttgtgcaatagggtcagccaaatcaaatatcgggcactgtgagagtgcggcaggtatcgcaggagtaacgaaggtattgctccaaatgaaatacaggcagcttgcgccttccctgcattcaaacgtgctgaacccgaatattgatttccttaactcgccgtttaaagtacagcaagagctagaagagtggaagaggccgatcatcagtgtcaatggcaaagacatcgaattaccgagaatcgcaggagtctcttcatttggtgccgggggtgtgaacgcccatattttaatagaagagtatgattcggaacctgtggaggagcgtttaccagcgaggaaacagccggctgtcattgtgctctcagcaaaaaatgaggaaagacttcagaaacgcgcggagcgattgctgcataccattcgtgaacaaacatatgttgaagcagatttacaccgaattgcctatacgcttcaagtcggacgggaagcgatgaacgaacggctggcgttcgttgcggaatcgatgcgggagcttgaagaaaagctgaatgaatgtatctccggaacagaaaatcgtgaatatgtctatcgcggacaagtaaagcgcaacaaagaagccattgctgcttttgctgctgatgaggatatgtcaaaaacaattgaggcatggctgcaaaaaggcaaatatgcgaaggttttagacctatgggtaagaggtttgcgcatcgactggagcacgctatatcaggatcaaaaaccgcagcgcatcagtttacctgtctatcctttcgcaagagatcgctattggatagacgtacatgcaatggctgaggaaaaaagaacggaggagccattcgctccggtacagcccgtccttccaaagccgtctgtagccagagaagccagcggcaagcctgccaatattacgttacagcctttaatgaccaatcaggatcgtttagagcgttttccatcagatacagaaacagagacgatcacggcggaagccttgtgcgatgaactgacagcgggcttagcggaagtgctgtacatggaccaaaacgagattgatccagacgaagctttcatagatatcggtatggactcgattaccgggctcgaatggataaaagcaataaataaacagtatggcacatcactaaatgtcacaaaggtatatgattatccgacaacacgtgatttcgctgtttacttagcacacgagttaagcacacaggctggggagaaaaaacaaacggagacgtacacgccgatcagacaaaaaacagcggtacctgctgctaaaccggctaatatatctctgcagccgttagaacatcatcagccagtgcaagaggagggtgaagaaacgattcaatatgcagcggcagaaatatctgcatcaagacaatatactgtagcaattgaaacgctgcatgaaaacttgagggaaagcatagcagacgtgttatacatggagccatacgaggtggatattgacgaagcgttcatagatatcggaatggactcgattaccggactcgaatggataaaagcggtgaacaagcaatacggaacgtcttttacggtaaccagggtatatgattatccaacgatacgtgattttgccgaaatgctaaagtccgagcttggaactcatcatgatagagaggtagagcatactgttcctatcgaagcagtccagcaaaagccagcagcaccatctaatccaaagccggcagaacggccccttcagcctgttcaacatccaataaagaaagaacatgagaagaaaacggtacctgttcatcaagactacccggaggatgcgatagcgattgtcgggatgtcgggaagatacccgggcgctcgtaatgtaagagagtactgggataacctggttcatgcgagaaatgctattcgggacattccaacatcacggtgggatgttgacaaatactatgatcctgtcctcaacaaaaaaggaaaagtctattgcaaatcaatggggatgcttgatgatattgaacattttgatccgttgttttttaatattccgccgtcagaagctgaactgatggacccgcagcatcgaatctttttgcaggaaggctataaagcctttgaggacgctgggtacaacgcccgaactttaaatgagaaaaaatgcggtgtatatctcggcattatgagcaatgaatacggggtcatgctgaaccggcaggcaagagcaaatgccaccgggaacagctttgcgatcgctgcggcgcgtattccatattttcttaatttaaaagggcctgcgattcctattgacaccgcttgttcatcttcattggtcggcacacatttagcgcggcaggcacttataaacaaagaaattgatatggcgctggtcggcggggtcagcttatacctgacgccggaatcttacatcagtatgtgtgaggccggcatgctttcacctgatggacaatgtaaagcatttgacaatggcgcgaatggttttgtgcccggcgagggtgcgggtgcgctggttctgaaaaggctgaaagatgcagaagcggaccgtgaccatatttatggcatcatcattggctcgggtattaatcaggacgggaaaacaaacggaatcacggcaccgagtgcaaaaagccaaatggacctggaaagagacatatatgaaacatacggcatacatcctgagagtatcagttatgtcgagatgcatggcacaggaacaaaacaaggcgatccaattgaattagaagctctgtccaccgtatttcaagaaaaaacagacaaaaagcagttttgcgcaatcggttccgtcaaaagcaatattggccatacatccgcggcggcaggagtagccggggttcaaaaagtgttattatgtatgaatcataaaacacttgtgccgacattgaacttcacgacaccgaatgagcattttgaatttgagcattctcctttatacgtaaatacggagcttaagccttgggaaacgggtgatggaaaaccgcggagagcatgtgtgagctctttcggatatagcggaacgaatgcccatatcgtgatagaggaatatcagcctgaaaagaggagcgatccattaacaaagcagcaccgctcagcattatttgtactttcagcgaaaaaagagaagcaattgaaggcctatgcggaagcaatgaaagatttcgtaacttccaatgaagatatcgatctggaggatatggcatacacacttcagacgggccgggaagcaatggattatcgcatggcgtttttggcggattcgagagaaatgctgatcaaagctttagatgattatttggctgaaatgccgaacggcagcatatttgctgctcacgtgaaaacgaagaagagcgaaatcaagctgtttgaaacggatcatgatgccaaagcattgctgcaaacatggatagagaaaaaaaggctggagaaagtagcagagctatgggtgaaagggctgcagatagattggaacaagctttatggggaatacacgcctcgccgaatcagcctgcctgcttatccgttcgcggaagagtattactggctgccaactcaagaaggcgaacccgaaaccattgctacagcaatgcctcaattcgaactgatgccaaagcgctgctttctgcgtaaacagtggcagccttgtccgattgaaccggcagaaatgacgaatcaaaccgtcgccattttggcaaatgaggagacaatggcattagcggaagagctttcgacgtatttctcgacataccgtatatttgacagccaagagctggatcgggtatctgctgctgactatgaacacgttgctggagcaatcgatctgatcgggtgcggaacgagccatgagcattctatgggctggataaactggctccaaaagctgatcgagcaaggacgtgcaagcaagcatcatttgacggtcttgggtgtaacaaaggggctggaggcctacgcaaatgagggtgttattttgtctggtgcttcacgggccggtttataccgcatgcttcaaagtgagtacagccatcttacttcaagacatgcagatatggaatgcgaagcctctcatgaggagctggccagactgattgcagttgaatattatgccaagagcacagaatcagaagtctgttatcgaaacggacagcgatatcgcgcatatttgacagagcagccagcagaagccgctctaagtcataagcaagtatcgttttcaacagacaaagtcctgctcattacaggcgggacaagaggtctcggcttgctgtgtgcgcggcattttgtgaaaacatacggcgttaagcggctggtccttatcggccgtgaagagcttccaccgcgtgaccagtggaatttggtaaaaatttcctcgcttgccgagaaaataaaagccgttcaagagctagaagacatgggtgcgcaagttcaggtgctgtctctggatctcacagacagggttgctgtcgaacagagcctgaagacaatacacgaaacaatgggggcgattggcggagtcatccattgtgccgggatggtgaacaaacaaaacccggcttttatcagaaaatcactagaagagatcggacaggtttttgaaccgaaagtcgaaggtctgcaaacgttgtttgacctgcttcaagatgaaccattggcgtttttcaccttgttttcatcagtatcagcggccatccctgcactagcagcaggacaagctgattacgcgatggcaaatgcttttatggattattttgcggaggctcatcaagataaatgtcccattgtaagcattcagtggcctaactggaaggagaccggtttaggcgaggttcgaagcaaagctttagaacaaactggattgatcagtttgacaaacgacgagggattacagctgcttgaccagattctatcagacagacagtatgctgtcgtgctgccggcagtaccagatacaaacgtttggaagccggataagctgatgcagccgtcattgcctgtcgaagctctctcgcatcctgagacgaaagagcaaaccggcactcgcaacctgttccctgaaacagtcgactggctcgtaactcttttttcagatgaactgaaaatagctgcagaagactttgaaacggatgaacctttccaagaatacggaatcgactcgattatattggcccagctggtacagcagatgaaccaacaattaaatggagatattgatccgtcaatcttgtttgaatacccgacaatagaatcctttgcacactggctcatttcgaaatatgacatatcagctgttttacagccatctgttcctgagaaacagacacctctcaagccgcaatcagcaatgaaacagaagctggtgccagaacagcggccgcaacagataagccatgaaaaaacggcacttcttgctgaggacatcgctatcatcggtcttagttgcaggttcccgggagcggaaaccctagaggaatactgggatttaatacgtgatggacggtctgcgattgcgcctgttccgcctgaacgattcgggaactccagctcgaattacgcgggcctcattgatgaaatgaaccgatttgatcatgatttcttcatgatgtccgaaagcgatgtcagagcgatggaccctcaagctttggctgtattggaggaaagcttgaagctatggtatcacgcgggttatacagagaaagaagtgaaaggcatgagggctggtgtttatataggaggccgcagccagcacaagcctgatccggccagtctttcaaaagcaaaaaatccgatagtcgctggtggacaaaactatttagcggctaacatctcacaattttttgacttgaagggaccgagtattgtcctggataccgcttgttcctctgcactggtggggctgaatatggccattcaggctctgcgaagcggagatattgaggcagcggttgtaggcggcgtcagtttgcttgatgctgatgcgcatcgaatgtttcatgagcgcggacttttatgtgacaaaccgtcattccatatttttgataagcgggcagacggtgtcattttaggagaaggcgtgggcatggttctcgtcaaaaccgtcagccaagcggttgaagacggagattccatatatgcagtcattaaagccgctgcgattaataatgacggaagaacggcaggcccatcatctccgaatctcgaggcacaaaaggacgtcatgctgtcagcgcttgaaaaaagcggcaaaaagactgaagagatcagctatctcgaagcgaacggatcggggtcggcagtaacagatttacttgaattaaaggcaatccagtccatttaccgttctgaatcaaaggctccgttagggctgggatcggtgaaacctaacatcggccatccattatgtgcagaggggattgcgagcctgattaaagtagctttaatgctgaagcatagacaattggttccgttcctgtcaggtaatgaaaatatgccgtattttgatatagaaaaaacagatttgtatttcagcagatcgcaagccgagtggaaggagacaacgccggctgcggcaattaattgttttgcagatggcggaacgaacgcccatctcattatagaagcctggaatgaatcggttgctcgtccaattagaagaaaacctctgcctttgccggaattaaataggcagcccgttttaatcaaaccatcagctcaaaacgtgcaggaaaaagtgcattcagacacaggggcttctaaagatatgttttggaaaactttcaaataagagaggagtgggaaaatgataactgaacaactgcacatttcattaaataatccaatcatgtccaaccacaaggtatatggacaagcgttattacccggccttgcttatatagatttgatctaccaagtattccaggaacatggttatgtataccaagagcttgaattaaaaaacctgaccattttttaccctttgatcgcagatgagtcatatgacattgccctgaccattcacgtgtctgaaagaaaggaagggacatggtccatcatcatcgacggacaaaaacagcatggagaatcactatctgacaagagacaatatgtgactgctgacatgcatcgtaaagagcaaaccgcttttgccgaatcaatagaccttaatcagtggaaaagtacagctgacaggattctgaatttagatgaaatctatgaacaatgccgatctcaagagttagtgcataccggcatgatgaaggcggaaggacagatttatgaagccaaagagggggctgtaattgatttagcagtcggacaggaagcattgcgtcattctgatgcttttctgtttcatccgacgcttattgacggcagcggcataggttcaagctgcctgatctcagatcaaacgatgtacctgccattgtattatgaatcgttttctgcttcagaacgattgcaaaaaggatgtacagcacggatcctctcctcatctgtgcgccaaaagaaagagctcacttatatgacgattgaatattttaattcatcaggacaaaaagtggccgagctgaaacaatttgcaggcaagtctgtacggaatatgtcagcctttcattctccaaaagaaattcaagaagaaagagctgctgtctctcagaacatcagtcaggactatcccgcatttgaaatgtatttgcgtcagctgcttgctaagcagcttgaaaggccggcagaacaaatggatatccacgctgggtactatgagcttggtctggattctccgtcattgcttaccgtggttcaggaaattggagataaggttggagcggatcttgctccgacactgctgtttgaatttacaacaattgcagaactagctgctcatcttgctgatcactattcaattggagaggcggacgatgctgtccgccaatctccttcaccaatgaaggattctcctgatggtgttacctcttcaccagagatcggggaggacattgccattatcggaatggcgggacgctatcctaaggcaaaaaacatacaggaattttgggaacatcttaaagcgggtaccgactgcatcacagagattccaaactcacgctgggagtggaaagaaaacaatggacaggattcacctgcaggcaagccactctcgaaatggggcgggtttatcgaggaggctgattgctttgatcctcaatttttcagaatctctccgcgtgaagcggaaatgatggaccctcaggaacggttatttttagagacatgctgggaagctattgaagatgcgggttatacaccagagacaattgcttcaccgcagggagaaaataaaagacagcatgtcggtgtgtttgccggcgtaatgcataaggactattcccttataggggctgaagctctatcagaacacaatccatttcctttatcgctgaattatgcgcaaatcgccaacagggtctcttactattgtaatttccacggcccaagcatggcggtggacacggtctgctcttcctcattaactgcggttcatctggcaatagagagcatccggaatggagaatgcgaggccgcgcttgccggaggcgtcaatttgtcattgcatccggctaaatatatcagctatggcagtgtaggaatgcactcaagtgacggctattgccatactttcggcaaagacggagatggctacgtatctggagaaggtgtcgggacagtattgctaaaaccgctgcgaaaagctgaacaggacggtgaccgaatctatgctgtcatcaaaggaagtgcgataaatcatgtaggaaaagtaagcggaattacagtaccgagcccggtagctcaagctgatgttatcgaagcgtgtctagaaaaaacaggaattgatccgcgcaccatcagctatgttgaagcccatggcactggcacctcattgggagatccgattgaaatacaggggttagtaaaagctttcagccgcaatacgcaggacaagcaattctgttcaatcggttctgttaaatcgaatattggccatgctgaagctgcagccggcattagcggcttaacgaagactgtcctgcagctgcatcataaaaccttggtgccgtcattacattcagaagagctgaatccttatttgaagcttgatcaaaccccattttttgtccagcatgaaacaaaggaatgggggcagccatcttttacagaaaacggggtggacgtcacatatccccgccgtgccggtttaagttcgtttggcgcttcaggatcaaatgcgcatcttattttggaagaatatattccggccgagagccattcagaaacgattttaacgaaaaatgaaggaatagtgatacctttgtctgcgagaaacaaagatcgtctgcaggcttacgctcttaaacttcttgattttcttagcgaggacgtcaatcttttagcgttagcttataccatgcaggcagggcgggttgaaatggaggagcgtgcggccttcatcgtaaaagacataaaagatttaacggctaaacttcgggcgtttgccaatggagaagaagagatcgagggctgctggaccggacaagccaaggagaatcaggaggcggctgggctagcatcggtaaatgcgctgaataacaatttgacaacagacagtgaaatgatggaaatggcgaaagcatgggttcaaggacagcgggtcacctgggacgacctatacggcgatcgcaagccgcttaaaatcagtgttccgacctatccgtttgcaagggagcgctactggatcccggttcctgaaatgaaaaccagcactgtgaatcatatcttacatccgctggtgcaccgcaatacatcagactttactgagcagcgctttagctctgtatttacaggcacggaatttttcctttcagatcatgttgtacagggacagaagattttgccgggcgttgcctatttagaaatggcaagggaagcagcggaaaaagctgcaggcgatctggacggcaaacaaagagtggtgtcgcttaaagacattgtgtgggtgcgtcctatcacgattgaaagtgaaccaaaagaaatacatattggcctttttcctgaggataacggggaaatctcctttgacatttatagcagctctgaacataaagaagaagccctgacgatacactgccaaggccgcgctgtcatttcagatgaagcggacacttccattttaaacctttcatcaatacagacagaatgcagtttggacacagtgacgtcagaacaatgctatgcagcgtttcgaaagattgggcttgactatggagagggctatcaagggattgaaaaagtctatgtcggcaaagatcaattgcttgcaaaaatctcgttacccgcttttctaaaaaacgacaagcagcattttgcgctccacccgagtttgatggattccgcgttccatgccacagtcggttttatcgttagctcagtcaatgccgctggacaagctcagacgctgtctcttccatttgcgttgcaggaggttgatattttcagcccatgtccagagaagatatggtcttatattcgatacagttcagacagtaaagcggaggacaaagtcagaaagtatgatattgatttatgtgatgagaacggacacgtttgtgtgcgaatgaagggtgcctcgatgcgggcacttgatggagagcggcattcaaggtctcaactagtaactgattctcagctgaccgggcatacgatgatgatccccgtctgggaaccagtctctctagaagcggaggataatgcttcgtttgctggtacacgagttgttttatgcggtgctgctgaagctgatcgggcattaataaagcatcattatccgcaagtatcctttatcgatatccggcctgcagatgacattgagggaatagcggacaaactgcaagcgtacggaagcattgaccatgttttgtggattgccccgtcacaccggggaagtataggtagtgatggacaagaagaagctgttcttcacttatttaagcttgtgaaagcatgcctgcaattaggctatggcgagaaacaacttgaatggtctcttgtgacaatccaagcgcagccggttacgcaacatgaggcagtacaacccgctcatgcaagcattcatggacttgccggcacaatggcaaaggaatatccacactggaaaatccgtcttctcgatcttgaaaaaggctgcacatggccggtaaatcacatgtttgcgctcccagctggccgccttggccatgcttgggcctatcgtaatcagcaatggcatcagcagcaattgatcccatatcggcactcactgtcaggcgacacgctatatcggaaaggcggagtctatgtggtcatcggaggagccgggtatatcggagaggcgtggagtgagtacatgatccgccgctaccaagcgcaaatcgtttggattgggcgaagtcaacttaatgctgccatccagtcaaaaatagaccgactttcggcgcttggccctgagcctttctacattgcagccgatgcagccgataagcattcattgcagcaggcttatgatcaagtgaaaatgcgccatcctcatattcacgggattgttcactctgcgatggttttatttgagcaaagcctggaaaaaatgaagccggaagaattcaccgctggactggcggcgaagatcgatgtcagtattcggatggcccaagtgttccgccaggagaatgtagattttgttttattcttctcttcgcttgtagcccatatcaaaaatgtgaagcaaagccattatgcctctggctgtacatttgcagatgcttttgctcaccggctttctcagagctgggcatgccctgtaaaagtcatgaactggggatattgggggaatagtgaagcggctgaggatgaacattatgtacagctcatgaatcaaatcggcttaggtttaattgagcctgcggaagctatgaaggcgctggaagccctgctttctgggccagtcagccaaacagctttcattcatacgacaaagcctgtagcagtcgaaggcgtgaatcagaatgaattcatcgctctttatccagagcaaccttcagcagatgcagagagcctgatggagcgtctgccgactacggcacgatttcaaagagtgacacatgaagagcttgatgatcttctttacaggctgttgttaggacagcttcaaacagccgggctgtttgatggttatacattatcggttgaacgtcttcaacaatataagactcgtgaattttatggaaaatggattcggcaaagcagcgaatttctcttgcagcatggctatcttaagaaagttggagattcattggtgaggaaggaccaagcagaggatatcgagctgctttggcaagaatggaatgcgaaaaaagaaaagtggcttaaagacagcgagacaaaggcgatggttgtattagcagaggccatgctgaaagcattaccggatattttgacagggaaagtccctgcaacagatatcatgttcccgcattcctcgatggaactggtggaaggcatttataagcataacaaagtggcagattattttaataaagtgcttgccgatacattattagcttatctggatgaacgtctgaagcacgaccctgaggcatcgattcgcattatggaaataggcgcaggcacaggcggcacgagtgccggaatctttgaaaaactgaaaccatatcaaaagcatatcaaagaatattgctatacagatctgtctaaagcatttttgctgcatgcagaaaaggaatatggggcggaaaatccgtacctgacatatcagctttttgatgtggaaaaaccgattgatcagcaggaatttgaagcgggaggctatgatgtcgtcattgccgctaatgtccttcacgcaacaaaaaatatccgtcaaacactgcggcatacaaaagcggtaatgaaaaacaacggaatgctgctgctgaatgaaatggcgggaaacagcctgttccctcacatcacctttggtcttttggaaggctggtggctgtatgaagatcctgcagtgcggattcccggctgtccaggcttacatcctgacagctggaaagcggcacttgaaagcgaaggctttgaatctgtctttttcccggccgaggcggcacatgatctgagtcaccaaatcgttgcagcctcaagcaacgggctggttcgccgtatgatgaaaaatgtgatcttgccggagaaggttgtttcacaagcgtctaatcaggagccagcctacattcataccatagattcagaggaagctggacaatcaaaacatgctctcctaagagaaaaaagcacagaatatatgaaaaaactaatcggggaaacgttgaaaattcctgcaggaaagattgagtcatctgaaccgcttgaaaagtacgggattgattctatcgttgttgtccaactgacaaatacattgcgtaaagaatttgaccatgtaagcagcactttatttttcgagtaccagaccattgacgcattagttgatcatttcatcaaaacaaaaacagaagcgctgatgaaattaacaggtcttgaccgtcaagttcaacaacagacaccggccgaaagcagaacccaatcctcacagaaacctgatcaggccgctaaaagaacacggcgctatcgcaagcttggcttcagcggggagaaagaaacaccgacaaacactcttgcaagccgtgacgttgccattatcggcatttctggacgctatcctcaggcggaaacagcagaagacttttggaacaacctaaaagaaggaagaaattgtattgaggaaattccgaaagatcgctgggattggaaagcttattacgataaagaaaaagaaggatcaatttatacgaaatggggcggatttatcaaggatatggacaagtttgacccattattctttcagatttctccgcttgaggcagaaagaatggaccctcaggagcgattatttctgcaaaccgcttatgcaagtattgaagatgcgggatacacgcctgactcgctctgttcaagcagaaaaatcggcgtctttgccggagtcatgaacaaaaattatccgaccggctacggctattggtctatcgccaacagaatatcctatttactgaatttccaaggcccgagtcttgcagtcgatacagcctgctcatcctccctgacagcgattcatttagcgctggaaagcatctatagcggatcgagtgattgtgccattgccggcggtgtcaatttagttgtcgacccggttcactatcagaatttatctgtcatgaatatgctctctgctagtgatacatgtaaatcattcggcgatgatgcagatggatttgtcgacggtgaaggcgtaggcgccattgtgttaaagccgctgcagcaagcaatagcggacggtgaccatatttacggtgtgataaaggcaagtgccattaatagcggaggaaaaacaaatggatacacggttccaaatcctcatgcacaggcacaggtaattaaagaagcaatggagcgcgccgacattcctgcccgaaccatcagttatttagaggcgcatggaacaggcactgcattaggagatccgattgagatagcggggttaacaaaagcatttgagaaagatacgcaagagaaacagttttgtgcgatcggctccagcaaatcaaatatcggtcattgtgaaagtgcagccggaattgcagggctgacaaaaatactttttcagtttaaatatggccaaattgcgccatcattgcatgctcagcggttgaatccgaacatcgagttcagccatacgccatttgtcgttcagcagcaacttggtgaatggaaacgcccggtgattggcgggcaagaggtgcctaggcgcgctggcttgagcagttttggcgccggagggtccaatgcccatatcatcctggaagaatatattccaagaacgggggcgcaaacgccgaaagaccatcctccagcgctgattgtgctgtcggccaaaaacatggaacgcttgcaagaaaaagcggaacagctgcttacagccatcaaacaaaaaaggtaccgcgaaacagacctgatcaggatcgcctataccttgcaaacaggccgtgaagcaatggaagaacggctggcctttatagcggaatcactagaggatcttgagagaaagctgaacgattttatcgaaaacaaagcagacagcctgtatctggatcgcatcgaggataacaaaaaagcgttagcagttttatcagcggatgaggatacggaaaaaatcatagaagcatggatgagcaaagggaaatacacgaaactactggatctttgggtgaaaggcttgtctttcgactggggcatgctgtacggcacccaaacgcctgtccggatcagtcttccggcatatccatttgcaaaagaacgttactgggcaccaggcgcggcaaaggctccggcgtctatagaacaggatcatgatcagcaaacagaagaacctttcaaggttatgacttttcaagaagtgtggaaagaagagccggcgactctcacatcgaaacgtatcaaaacgctcatctgttttctgactgaaagagaaaagcaaaacgcatttgcttcagccctgaaaaacgttgatcaagacaccaaggtcatttttatatcacagggcgaagtgtacagcaaacagtctgaatatagctaccagattgtgcggcaagaacccgttacttttgaaaaggccttccagagcattaaagaagaacttggagagccagatgcaatcctctatatgtggcctatggaagacaagcgctgtataaaggaccattcctgtattgtttacctattacaaggtatgtccgcagcaaagcttcatccttcacggctgctgctggcaggatgttttgaagatggtcttgaccgaagttatctggaatcatggattggcttcgaacgttcactcgggcttgtcctcccgcacacaaaagtgactggaatctttcagccggtggaacaaggatcgatggatgattggacacgtaaaatatggggagaattacaggcttcagctgaacaaacggttttgtatcagaatctgaaacgatatgtaaatcacattgaacagacaacgatacaaccggacgacagcaaattgaagtctggcggtacttacctgattacaggcggtgtaggagggcttggttatttatttgccaagcatttggccaaaaactatgccgcaaacctgattttgacagggcggtcgccttttaatgatgaaaagcaaaagcaaataaaagaattaaaggatctaggcggcgaagcgatgtatgcagaagcagatgtgtctgatcctatcgcaatgggagactgcgtaaaaagagggaaagaccgattcggtgccatcaacggtgtcattcatgcagccggaatcgagagcgactctgctatttttgacaaaaagatcgaaagctttcagcgcatcattgaaccgaaaatcaacggcacgatagcgcttgatgaatggcttaaaaatgaagaccttgattttatgtgttatttttcttcttcttctgcggttttaggggattttggatgttgtgattatgcgattggcaataggtttcagatggcttacgcacaatacagaaatgagctgcataacggtaaaacgtttgtcatcaactggcctgtatggaaggatggcggaatgaagatcggtgatgaggaaacaacggatatgtacctgaaatcaagcggccaacgcttcctagaagccgaggaaggcatccgtatgtttgagcacatcctagctcagcaggatgctcagcatctcgtgatagccggtcagcccagccgtgtcagcagatttttaggaatgactgaaccagctattccagaaccggccactcaagcccctctagcacaagaaaacaaggatgaggtaaaaacgttaagcattgaaaagcgtttagaacacgacttgaaagagcatattcacacattgcttaagatttcaaaggacaagctgaatttgaacaaaaattgggccgacttcggatttgattcaatctatttggctaaattctcgaatgtgttatcaaagcatttcaacatcgaagtgacaccggctttatttttcggctattcgactttacaagaattgatcggctttttcttaaccgatcataaagagctgattgaagcattttaccgggatgatgcatcagaggcgcaaaagccccctgaagcttatgcagcaattcctgtagctccagaaccggaaaccagtaaacaaagcattcggcaggttcacgatgagcctattgccattatcggcatgagcggcaggttccctcaagctgattcggtccatgagctgtgggataatctgaaaaaaggtaaatcgtgtatctctgacatcccgggcgaacgccgggactgggggagagctaacagagatccagaaaaagcagtgccaaggtggggggcatttttgaagggcatagaccggtttgatccgctgttttttcaaatatcgcctaaagaagccgaaagcatggacccgcgccagcgcatttttctagaggaagcatggcacacgtttgaagacgccggctatatgggagatcggataaaaggaaaatcctgcggtgtttatgtaggtgtggaagaaggggaatatgcgcatctaaccggagatacggattacattaacggaacacaaaacgccacattgtctgcgagaatcgcatacgcattggatttaaaagggcctaatatggctttgacagcagcatgttcatctggactggtagcgattcaccaggcatgttcagctctgcgtcagggggattgtgaaatggctttagccggcggcgtcagcttgaatatttctcacatgtcttttgaggcgctgacaagggccgaaatgctgtctccgaacggacaatgcaaagtgtttgaccaggatgccaatggtcttgtgccaggtgaagcggtggctgctgttctcttgaaaccattatcaaaggcaattgaagataaagatcatatttatggctgcatcaaggccagcggcgtgaattacgatggcaaaaccaacggcattactgcgccaaatccttttagccaggcagaattgatcgaaaacatttatgaaaaaaatgaaatcaatccgctcgatattcaatatgtgatggcgcacagtaccggctcgaatcttggtgatccgcttgaggtccaagcgttaacgagcgtgttcagcaaatatacgaagcagaagcaattctgtatgatcagctcaattaagcctttaatcggacatacatttgcagcgtcaggaacggttgctttaatcagtatgctgatggctatgaaaaaccagatgattccggccactcatcactgtgaatcggaaaaccagtatattccgtttaaagaaagcccatttgtgctttgcaaagaaaaccgttcgtggatcaggaaatatcagaagccgaggatgggaacgatcagcacgactggaatcagcggcaccaatgcacatgcagtcattgaagaatacattccggaagatcagccgcccacacagcggcatcaagggtcaccgcaggtcatcgtgctttcagcccaaaatgacgatcggcttcaggatgctgcctgccgcatgattgcgtatctggagcagaatcataacctttctttacctgatatggcatatacgcttcaggttgggagaaaagccatggaagcaaggctcgcgatcgttgcaaacaatcagaagcaattggtgcaaaaattgaaggaatatgtggaagcaatgaagaatggtggggtatcaggccaacagagatccctttatacaggatatacagaagggattttagaagaacaagatgaagcagttctgcaagctctcgcaaaagaaagaaatttggaaaacatcgcggattgctgggtgaaaggatatcagattccttgggaactccttcatgatggcgatcacgttcgaatggtttctttacctggttatccatttgcaagggagcggtattgggtttcgtcaggcacccagcaatcagtggccgttaaacagcattcacaagatatgaaaacagagattgacgagccgaatggcaaaaaccatattcaaaagatcattgttcaatttttagcacgagaattgggcatatctgaggatcgaatcaatttcaaaagaaactttttggattatgggatggattcaattcttggccgaaaattgatgcggcatatcgaaaaaaccacgcagctgaagatggccggtcgggaaatccttgaatgtcagacagtccaagctctatctgaccatttggccttaaaagcggaaaaacaaaatcatagcgcagcagcacatcaaataaaggacacgtatacagacgggcaaatcatcggattaatgcaagaggtggcgctagggaaattggattttaagagtgtgcaaaacatcatagaagggagtaaatcgtatgaatcataaagaaattctcgatgccttcagatcaggagaattaaccatttctgaggtggaagaacatcttaaaggcatgaagcggcagttgaaaagcccgctttctgaagggcaaaaagggctgtggatgcttcaaaaaatgtctcctgggatgagtgcatatcatattcctttatgctttcgcttcagcaaaccaatacatgcagagacgttcaagaaagcccttctgtttgtacagagacaatatccgatcttagccagtgtgattcaagaagaaaatggcattccatttcaatcggttcagttatcaaaggatctttattttgtggaagaggatatatcagcaatgaaatcagcagatatctttccttttctaaaagaaaaagcaaaagaacctttccagttggaagctggtccgttatggcgcacacacctttttcatcggttagaagaatgcattgttcttataacaattcaccatatcatatttgatggtgtgtcgatgctgacattgatatcggcgctattcgaagcgtatcaacaattgctgaatgggattgagcccttgcagcagccattaacagctgattattacgattttgtcgattgggaaaaacggatgctgactggcagagaaggggaagagcatctcgcttactggaaagaacagttgtctgggagtctgccagttcttgatttgcctgctgaccgtccgcggtcttcatcacgaaaattcaaggggcaagcttataaaagcttgctcccccatcacctgagcaatcaaattaaatcgtttgcccgcaccaatcatgtgaatgaatcggttgtgtttctctccatttacaaagtgttgctgcatcattatacaaaacaaaaggatatcattgttggcgttccgacaatgggtcggcaagatgacagatttgaaaccctaatcggttattttatcaatatgatggctgttcggagcaagaatatcggatctcagccattaacagcatttattcgggaactgcagctgacagtggctgacggcctggatcatgcggcgtttccgttccctgcattggtaagagagctgaatgtagaccgatcggccgcggattctccggtttttcaaacagcttttctgtaccaaaacttttttcaggcaacaggcttgcaaaaagtgctcgaaccgtatcaaacgcttggcatcgaatatattgaagacattcggcaagagggtgaatttgagctggcgctcgaaatatatgagcaagaaaatgaaacagtgcttcatcttctgtacaaccctgatttgtatgaactgtcctccattgaaaacatgatggagaactatatgaagctcgcgcaacacatgatggatgacccgtctttgccgcttgaagcctactctttgcgattaaatcaagaacaaactaatttggtggaacaatggaatgcgacagggacaaacatcgcaaatgacaagtgtatacatgaggtgtttgaggaaaaagcgaaacaaacccccgatgcggttgctgtgatgtttgaagacagatcacttacatataaagaagtagatgaaaaaagcacatctgtggcagtctaccttcaacatcagggtgttagacctgaacagcccgttggcatttgtgcagagcgttcgtttgatatgatcatcggaattttaggaatactgaaagctggcggagcgtatgtgccgttagatccaagttttccgcaagaacgattagagtacatgctcaaagacagtcaggcatccattgtcctcacccaacctaacgttcatgataggatcagcggattaactggcagccatgtaaaagcgatcaatatcgagttagcttgccgaaacgattatacagaccagcaaagcagcggtttaaagcgggaagtaaaaccggaacacctcgcttatattatttatacatcgggaagcaccggagagcctaaaggggttatggtagagcatcggagcattatgaataccctgaattttcttgaatctcactatcctgtaacggctgaggatgcatatttattgaagacgaactatgtgtttgatgtatcgatctcagaattattcggatggtttattggagacggccgtcttgtgattcttccgcctaatggggagaaatcaccgcagctttgcatggattatattgaaacatataaagtgactcacattaattttgtgccggccatgctgcatgtttttttagaaatggcgaaagacaacaaacgattcacagaggatggtccgctgaagtatatgatggttgcaggtgaagccttccctaaagaattagtgaaaaaggcggtatcactctttacaaactgccgtgttgaaaatatatacggaccgacggaagcctccatttacgctgcgtatttcggatgcggaaaaggagatatcgcaagtcaccatacaccgattggaaagcctgtctccaacacgaaaatttatattgtggaccagcatttaaagcctgtcccgatcggaaagcctggtgagctatgcatcgctggagccggcttagcaagaggctactttaaaaagccggggcttacggctgaaaaatttattgataatccctttgaaccagggacgaagctatataaatcgggtgattcagcaaggtggcttcctgacggcaacatagaatacttgggacggattgacagccaagtcaaaatacgcggttttcgcgtcgagctgggcgcaatagaaacaaagctgagtgaatttccgggcattttagatcaggccgtagtggtgaagcagctggaaggccatcaacagctcgctgcttattatacagaggaaagcggacatgcctctgccaatccaaaagatttgcgccttcatctaaaatcgagtctgccggaatatatgataccttcacactttatccgcttagatgagcttccattatcgcccagcggaaaagtgaaccgtaaagaattagaaaaacgcgagatcgtgttcaacataaggaaaccaaatcacttgcaattaacggaaatagaggatcaggtgctgcgcatttgggaggaaacgctcaaggtcagcggatttgggccggatgacggatttttcgatgcgggcggcgattcgcttctggctgtagctgtggctgaacgaatcaaaaaagaattcgattgtgagtttcatgttactgagctgtttgagtattccacgatccgtgcaatcagtgaatacattttggagatggaaaactcagatctagccgggacacaaaatgaagatcattatgatatcaaaaaagatagaaaacacctagaacagaagattcctccttattttgacgacagtgttgcgattgtggggatatcttgccagttcccgggtgcgaaaaatcatcatgacttctggaaccacatcaaagaaggcaaagaaagcatacgattcttttctgaagaagagcttcgcgcaaatggagttcccgaagaattgatacagcatcctgactatgtgccggtgcaatctgtgatcgaaggaaaagacttattcgatcccggtttctttcaaatctcgccaaaagatgctgagtatatggaccctcagctccgcctcttattgctgcactcctggaaagcgattgaagatgcaggatatgtggctaaggagattccggcaacaagtgtatatatgtctgcaagcagcaattcatatagaacgttattgccgaaggagacaacagaaggacatgaatcaccggatggctatgtctcatgggttttagcccaaagcggaaccattcccacaatgatctcacataagctcggattaaaagggccaagctattttgttcattctaactgttcttcatcactagtcggtttatatcaggcatacaaaagcctgacatcgggcgaatcacaatatgcgcttgtcggaggcgcaacattgcacgcacaatcagcgatcggctacgtgcaccaaaacgggttgaatttttcaagcgacgggcatgtgaaggcgttcgatgcttcggcggacggaatggccggaggtgaaggcgtagcagtcatcctgctgaaaaaagctgtggatgccgtaaaagacggagaccatatttatgccattatgcgcggaataggcatcaataatgatggggcagagaaggcaggcttctatgcgcctagtgtaaaaggccaaacagaagtgatacagcatgtattggatacaaccaagatccatcctgaaacggtcagttatattgaagcacacggtacgggaacgaaattaggcgatcctattgaaatgtctgcgctaaataaagtgtacaagcaatacaccgacaaaacacaattttgcggaattggttcagtgaaaacgaatatcggccatttggatacagctgcggggttagccggatgcattaaagttgcgatgagtttataccataatgaacttgcaccgaccatcaattgtacggagccgaatccggatataaagtttgaaagctctcctttttatgttgtccgtgaacgaaaatcgttagagaaacacgcaggtgtccatcgggcggctctgagctcattcggccttggcggaactaacgcccatgcaatatttgagcaatatgaaaacatttctgatgcaggtaccgaaaacgaaggcaatcagccttacatcattcctatatcagcaaaaaatagtgaacggctccaagtatacgcgaaggaaatgctgtcctatatcagtcaagacgagcaaaggcatttctctttaagagatattgcatataccttccaagtcggccgtgaagcaatggataacaggatcgtttttatagtgaacgatctggaagagtggaaacatcagctggaagcttttgtgactggaaagccgctcgcagaaggctgtattcaaggagaaaaaacgagaatgacatccgctgaacagctgcttggaaatgctgaagcagatgatatggcttcatcgcggatatcaaaagaagaattgagaaagcttgccgagatgtgggcaaatggctttcacgttgaatggcgcaggctctatccaaatataaagccacgccgcatcagcttgccgacatacccttttgccgaagaacgatactggcctgaaagcagcaccggcgctatcacaacaattgaaccatctcgtttgcatcctttggtgcaccataatacatcggttctgtcagagcagcgtttcagctccattttcacaggacaagagtattttattgccgagcatatcattaaaggcatggcgattttgccggcggcggtcacgcttgaaatggcaagagccgctatagaacaaggaattggcggattggaggatcatgaaactggaatcaggctgaaaaatgtcgtgtgggttcgcccggttgtagcaggaagtgagccggttcaggtaaatatcggactttacgatgaagatggcggacatattgcttatcggatgtatggtgatccggaatacgctgatgcagaaccagttgtatataaccaaggtaaagcggaattgattcagttaaagcgagaaaaagcactggatctttctaagatcaagaaacaatgtgatcaaagcaaaatggatgctgcctcgttttatgaagggatgatcggcgccgattacggtccaggttacaagagtgtagaggccgtatataaaggcgacggccagctgcttgccaaattatcactgccagaatctgttgcacatacgttgggcgattatgttcttcatccaagtgtaatggacggggcgttacaggcggctgaatatttgcaaaatgtcgtcagagcggaactttcagacactgaagactttaaggcagcactgccatttgcactggaggaacttgaggtttttcgtcagtgcgtttctgacatgtgggtttatgttcaattcaactcgaaaaacaaaccgggagatttgatacagaaagtcgatattcacctatgtgatgagcatggcatgatctgtgtgcggctgaaaggattttcgacgagagtgatggaggcagatatacaaaccgaaccatcaaaaatcaacgctgaaactttattgcttcagcccgtttggcaagaacaaaaggctgctaacagcttagctgcaaaaaaatatgcagagcatctcgtattcctatgtgaatatgatcatgagacgagaaaacaaattgaagcagctatcgaggatgtccatgtatacagcctggaagcaaggccttcttcagtagatgggcgtttccattcttatacagaacaagtgtttaaaaaggtacaagagatcattcgtacgaaaccgaaagacggcattctcgttcagatcgtgacctctgccgagggagaacagcaattgttttcagggttgacaggactgctgaaaacagcttgtcaggaaaatgccaaactaaccggccaaatgattgaagtcagcagtgaagaaagtggagaaagcattgctggcaaactgttagaaaatcaaatgagcggcgattcatatgtcaaatatcaaaacgggacacggtatattgctgattggcgtgaaatcaaacaggcaaaaggagacggcagcaaaccgtggaaagacaatggcgtttatctcattacaggaggtgccggcggactaggtcatatttttgcaaaggaaattgcggaacaaacgaaaaatgcgacagtcattctggcgggccgctcacctcttagcgaaagcaaaagcaaaaagctgaaagagcttcatagcaagggggctgacatcacctaccggcaaacagatgttaccaataaaattgaagtctatcagctcattgacgacattcaaaaaagatatggccgtctgaacggtattcttcatagtgccggaatcatcaaggacagctacctggttaataaacaggcaaaagatctgcacgatgtactggcgcctaaagtaaaagggcttgtttatctagacgaagcgagtaaggatttgcctttagacttctttattctcttttcatctctttcaggaagtttagggagcattggtcagtctgactatgcggcagccaatgtatttatggatatgtatgcaggctatcgaaatcggcttgccgacctcagccagcggcatgggcagacgctttctgtaaactggcctttatggagagatggaggcatgcaggtcgatcaagaaactgagaaaaggcttgtgcaacttgccggtattgttcctatgagggcggaaaaaggaattcaggcattatatcaagcacttcattcagaggcaaaccaagtaatggtgatcgaaggcgatgtgcagaaaataaaacaaaacatgctggccaaaaacgcctcagcacctatggaaaagaaggaagcagaacacatgactgaacaaataaatagcattgatgcagacagtttgctggataaagtaaaggcgatgttaaagcgagagatcgccaagctgttaaaggtcaagcttgaaacgattgatgatcatgccgagatgacggtgtatggttttgattctatctccatgactgaattcaccaaccatatcaatcgcgcctatcagttagagctgacgccaaccgtattttttgaccacccgacgattcatgcgtttggcaagcatttgtcagaagaatatcaatcggtatttgcgaagacatttgctgtgcgcgctgtatcggctcagattcagcctgccgcgaaacaggaacaagccgtgcgtgccaaagctaaaagacgcagaaagcagcaagtcatgctgccaaacgccatacagagtgatgctgggcctgagccaattgccattgtgggcataagcgggattttccctatggcgaaagacgttgaggcgtactggaacatcttaaaagagggcaaagactgcatgacggaaatcccgaaagatcgctgggattggcgtgaatatgaaggtgatccggcgaaggaagtcaataaaacgaacgtgaaatggggcggttttattgacggtattgcagattttgatccattattctttggcatttccccgcgtgaagctgaacaaatggaacctcagcagcgcttactgctgacttacgcctggaaagcgatcgaagatgcaggatattcggcgaaaaggttgtcaggcacaaagaccggcgtcttcatcggaacgggaaatacaggatacagctctcttctatctaaagcgaactcggcaatagaaggatcagcggcagccaatacgagcccatcggtcggtccgaaccgggtcagttatttccttaatctgcacgggccgagcgaaccgattgatacagcgtgctcaagttcactagtggcgatccaccatgccatctcttcaattgaggaaggcacttgtgacatggcattagccggcggtgtaaatacgattatccttcctgaggtgtatatcagctttgataaggcgggagcactgagcaaagaaggaaaatgcaagacgttttcaaatcaagccgatggttttgcgcatggggaaggtgccggcatactgttcctgaaaaaattaaaagcggctgaagaagcgggagaccacatttacggagtcataaaaggcagtgcaatcaatcacggcggccgtgcagcctctttaacgactcccaatccgaaggcgcaggcagatgttattcagtcggcatatcaaaaagcgggaatcgatccgaaaaccgtgacctacattgaagcccacggaaccgggacggagcttggagacccggttgaaattaacggtttgaaatcagcttttaaagcattgggtgtaaatgaaggagacacatcagtcaatccttactgcggtttaggttctgtaaagacaaacattggccacttatcgctggcagccggtgcagcaggagttattaaaatattattgcagcttaagcataaaaccttagtgaaaagtctgcattgcgaaaacgtgaatccatacattcagctgaaaaacagtccgttctatatcgtacgggaaacggaagaatggaaagcgctgaaaaatgaacggggagaagagcttcctcgccgggcaggtgtcagttcatttggaatcggcggggtaaacgcccacgtgattatcgaggaatatattccggaagcatccgatgagaatataccatccatcacgccggaacatccgggtatcttcgttttatcggctaaaaataaagcgcggctaaaagaacatgcacagcagctggcagatgcgcttgataagcaatcatatagtgacgtaaatctcgcccgaatcgcttatacactgcaagccggacgggatgcgatggaagaacgtctcggggttatctccggttccattgaggatgtacagcaaaagttaaaagactttgcagcaggcaaaagcggtgtggaggatgtatttaaaggcaggattgataaaggcacactccaaatgctgacagaggacgaagagattcaagaagctgtcgagaaatggatggaacggggaaagtatgcaaaattgcttgaattatgggtaaaggggcttgatgtagactggacgaaattgtatggcgagaatctgccaaagcgcatcagcttgccgacgtatcctttcgcaaaagaccgttattggatctctgatcatattgaaaaaatcggcagcattgatgcaaatcaagcagcctcccgccttggcggagccgtgctgcatccattaatgcatcaaaacacatcgaatctctcggaacaaaggtttagctctatttatacgggagaagagtttttccttgctgatcatgttgtgaaaggccaacggattttgccgggagtggctcatcttgaattggcgcgggcagctgttgagcaggccgcagaggtagaaggtgtaccgtgcaccatgaagctaaagaatgcggtgtgggtgcggcctattgttgtagaggatcagccacagcaagtacacattaggcttttaccgggagaaaatggtgagatctcttatgaaatctatggtcattcagacgttactggcgaacagtcaattgtctacagtcaaggcagcgcggtattgaatcctgctgaaaatctgccggcggttgattttcaatctctgcgggagcagtgtcaggaaagccatttcagcgtaaacgaagtatacgacacctatcgaatgattggatttgaatatggtcctgcttatcgcggagtgaaaaaaatctatacagctgaacaatttgttttggcaaaattgtcattgcatccgtcagctgcagatacgctcagccaatacaaaatgcaccctgggctgatggattctgctttgcaggcgtcaagcattttgacaggcgccggggataaccagctgacactgccttttgctatccaggagcttgaaatcttcggagcatgctcgtcagaaatgtgggtatacgcaagatacagccaaggcagcaaggcaactgataaggtgcaaaagcgcgatattgatattttagatgagagcggcaacgtttgcgtacggatgaaaggattatctttcagagcagcggaaggcggctctggatcggcggaatctgatcaaacgctggcaaccctgatgtttgaagaaaaatgggtgcctaaggattttaaaaaagaaagtcctgagcctcattacgaacggcacattgtcatgctttgcgacatgaatggcctctcaaaagatcgcattgaatcaagattgacaggagcggaatgcatcgttttggagtcattccgcgaaggacttgcagagaggttccaagattatgccgaacaagcgcttgagacggtccagggtcttctcaaaagcagacctcagggcaatgttctgatccagctgcttacctctgcacaaagaaagcagtactcattctcagggctatcggcgctccttaaaaccgccggcctggagaataaaaaactaatcggccagacgattgaaatcgattcacatgaaaatgttgaaagtgtaatagaaaaactgaaagagaataaaaggcacacagaagatcagcacatcaaatatgaaaaaggcaaacggtacatcaatgatctggatgaaatgcaaatagatgatcgggaaataagcatgccgtggagagataaaggtgtatacctcatcacgggcggcgcaggaggacttgggtttatttttgcaaaagagattgctcgtcaagccgaacagcctgtactcattctgacaggcagatccgcgttgaatgcggatcagcaggcggagcttaacgaacttcagcaattaggggctcgcgcagaatacaggcaggttgacgtgacacaaacggaagcagcctccgagcttatcacaagcattacgtctgattacgaagacttgaatggtgtcattcacagcgctgggctgattaaagataactatcttatgagcaaaaccaatgaagagctgacacaagttctcgctcctaaggtgaaagggcttgtgaatgtggatgaggcaaccgagcatcttgcgttagatttctttatcctcttttcttcaatatcaagtgttgccggcagcgcgggacaggccgattatgcaatggctaatgcatttatggacagttatgctgcttatcggaatgcgcttgtaaccgccatgtacaggcacggacaaacgttgtcaatcaattggccgctctggaaagaaggcggcatgcgcgcgaataaagaaattgaaaacatgacgttgaaaaacacaggtgtgactccaatgcggaccgagaccggcattcaagcgctgtataaaggtttggcatttggcaaagatcaagtcatcgtcatggaaggattcaaagacatgatgagggaaaagctgactcaaaagccgtcttctgatgatgtaccaatgaaaacagtgcaagtacgggtgacatctgaagcaagaatggatcaagggaatatgtttgaccacattcaagaagttttaaagcaaacaatctctcaattgctcaaaatcaaacctgaagagattgacccggacatggagtttaatcaatatggatttgattcgattacgttaactgaattcgcaaatacactgaatgagaagtgcaagctggatcttacgcctacggtcttctttgagcacgcaactgtttatgcatttgcagggtatctgtcagaagaatatccaaatgcttttacagctcaaacgcctgccaaagctgaggtgctaatgcagcctgtcgaacagaatataaaaaatatgacgttttcgactgaaaaccgctttgtaaaaccttcggtaacaccaatgcaaaaggaagctgatcacaagcctgagcctattgcgattgttgggatgagcggcgttttcccaaaggcaaaagacgttgaggaatattggaagaacctgtcatcgggcgcagattgtattacagaggttccaaaagaccgctgggattggcaggagtattacggagaccctctgaaagaagcgaataaaacaaacgtcaaatggggcggttttattgatgaagttgctgactttgatccattgttcttcggcatatctccgctggaggctgagcagatggagcctcagcagcgcctgttgatgacctatgcgtggaaggcggtagaagaagcgggacactcagcgagaagcctggcaggaaccaaaacgggcatcttcattgggacaggaaacacagggtacagttcacttctgtcaaatgtagacatcgaaggctcagcggctgcgaatatgagtccttctgcaggaccgaatagagtcagttatttcctgaacattcatggaccgagtgaaccgatcgacactgcgtgctcaagctctttggtcgccattcatcatgcggtttgcgccattgaaaatggaaactgtgaaatggcgattgcgggaggggtcaacacggtcgtaactccgcaaggccatatcgcctatgataaggccggggcgctgagcaaagaaggaagatgcaaaacattttctgacaaagccgatggattcgcagtcagtgaaggtgccggcattctctttctaaaaaagctgacagcggctgaacgagacggtgatcatatttacggtgtcattaaaggaagtgcggtaaaccacggtggccgcgcaaattctctaacgactcctaatccgaaagctcaggcggatgtcgtaaaaacagcatatgaaaaagcgggaattgatccaagaaccgtaacttatattgaagcgcatgggactggaaccaagctgggcgatccagtagaaatcaacggcttaaaagcggcatttaaagagctgtatgaaaaaacgggggacccggctgttcatggcagccattgcggacttggatcagcgaaaacaaacatcggtcacttatcgcttgcggccggtgtggcgggtgtcattaaagtgttattgcagctcaagcataaaacgcttgtcaaaagtctgtacagtgaaactgttaatccatatatcagactggatgacagcccgttttatattgtgcaggaatcgagagagtggcaggcgcttcgggatgaagctggccgagagctgccgcgccgcgcaggcatcagttcgttcggaataggcggcgtcaatgcccacgtggtcattgaggaatatattccgaaagaaacaacccatcctgcaacagcaccagccgtgacagcacagcacccgggcatctttattttgtcggcaaaggatgaagatcgtctgaaagaccaagcccggcaattagcagactttatcagcaagcgatctatcactgctcgtgacctcactgatattgcttatacactccaagaggggcgtgatgcaatggaggagagattagggatcatcgctgtctcgactggggacttgctggaaaaactgaacctctttatagaagggggcaccaatgcgaagtacatgtacagaggcagagcagaaaaaggtatcgcacaaacattgagatcagatgacgaagtacagaaaacgctcaacaatagttgggagcctcacatatatgaaagactgcttgatttatgggtaaaaggcatggaaataggctggagtaaactgtatgacggcaaacagccgaaacgcatcagcctccctacctatccatttgcgaaagaacgctactggataacggatacgaaagaggaggcagccgcccatcaaacagctttaaaaacagtcgaatcagcagctttgcatccattgatacatgtcaacacatctgatttgtcagagcagcgtttcagctcggcctttacaggtgctgagttctttttcgccgatcataaggtgaagggaaaaccggttatgccgggcgtggcatatcttgagatggttcatgctgccgttacaagagcagtgagaagaaccgaagatcaacaatctgttattcacatcaaaaatgttgtgtgggtgcagccgattgtggcggatggccagcctgttcaagtggatatcagtctaaatccccagcaggacggcgagattgcttttaacgtctatacagaggctgcacacaatgatcgaaagatacattgtcaaggcagtgcttcaatccgtggggcaggagacattccagtccaggatatcagcgcgcttcaagaccaatgcagtttaagcacactctcacacgaccagtgttatgaattgtttaaggcgatcggcattgactacggacctggttttcaagggatagatcggctttacatcggccgcaatcaagccttggcagagctttctctgcctgctggtgtaactcacacactgaatgaattcgttcttcatccaagtatggccgactctgctttacaagcgtcgatcgggctaaagctgaattccggtgacgagcagctttctctgccttttgcgctgcaagagctagaaatattcagcccgtgtacaaataaaatgtgggtgtctgtgacatctcgtcctaatgaggacaaaatacagagactggatattgatttgtgtgatgaacaaggccgagtgtgtgtaagaatcaaggggattacctcaaggctgctggaagaaggcatacaaccgccagacgggccgacatcactaggaaactccaaagcaactcttaacggagcgcttcttatggcgccgatatgggatcgagtgcagctggagaagaggagcatttcgcctgctgatgagcgtgttgtcatcctcggaggggatgacaacagcagaaaagctgttcaaagggagtttccgtttgccaaggagctgtacattgagccgaacgcatcaattcatagaattacaggccagcttgaagcactcggatcgtttgaccacatcgtgtggatgtctccttctcgtgtgacagagtgcgaagtcggcgatgaaatgatagaagcccaagatcaaggcgtcattcaaatgtataggctcattaaggcaatgctttctttaggctatggacagaaggagataagctggacggtcgtgacggtgaacacacaatatgttgatcagcatgatattgtcgacccggtcgatgccggggtacacggcctgatcggttcaatgtcaaaagaatatccaaattggcagacaaagctgatcgatgttaaaaaatacgaagatctgccgttatctcaactcctttccttgcctgccgatcaagaagggaatacgtgggcctatcgaaacaagatttggcataagcttcgtctaattccagtacacaacaatcaaccggtgcacacgaagtataagcacggaggtgtttatgttgtcataggcggagctggcggtattggtgaggcgtggagtgaatatatgatcagaacatatcaggcgcagatcgtttggattggcagaaggaaaaaggatgcagccattcaaagcaagctggacagacttgcacgtctagggccagccccgtattacattcaagcagatgcggctaaccgagaggaattagaacgcgcgtatgaaacaatgaaacaaacgcatcatgaaatcaacggcatcatccattctgcgattgtcttacaagaccgaagcctgatgaatatgagtgaggaatgtttcagaaacgttcttgctgcaaaggttgatgtaagcgtgcgaatggcccaagttttccggcatgaaccactggattttgttttgtttttctcttccgtacaatcgtttgcaagagcttccggacaaagcaattacgctgcgggctgcagttttaaggatgcttttgcacagcggctgtctcaagtatggccttgtacagtagccgtgatgaattggagttattggggaagcattggtgttgtttcatcaccggattaccaaaagagaatggctcaggcaggcataggctcaattgaagcccctgaagcaatggaagctttggaattgctgctcgggggaccgctgaagcagctagtaatgatgaaaatggcaaacgaaacgaatgatgaagcggaacagacagaagaaacgattgaagtgtacccggaaactcacggctccgccatgcaaaagctgcgaagctatcacccgggtgacagcacaaagattcaacaactgttataggaggagaagcgccaatgctgaacacagaagacattctctgtaaaatgcttttcgcacaattacagtccatagggtttttcacagaaagtaaatcccagccggtattggagaatttctatggcagatggtttgaagaaagccaatcgattttagaacggcatcaatttctcaagcgaacggagaacggacatgttccaacacgctcaataggcaccatgagcgagctgtggaaagaatggaatgaacaaaaatctgacctgcttcaagacaataatatgaaagccatggtgacattggtggagacagcacttaaagccttgccggagattctgaccggcaaggcgtcagccaccgatatcctgtttccgaattcatctatggatttagtagaaggggtctataaaaacaatcaagtcgcagactattttaatgatgtgcttgcagatacgttaacagcctatctgcaagaacgtctgaagcaagagcctgaggcgaagattcgaatattagaaatcggagctgggaccggcgggacaagcgcggctgtttttcaaaaattgaaagcatggcagacacatataaaagaatattgttatacagatctgtctaaagcttttctaatgcatgcagaaaataagtatggtcctgacaatccatatttgacatataaacggtttaatgtcgaggagccggcgtctgaacagcatattgatgcgggaggctacgacgcggtcatcgcggcaaatgtgcttcatgccacaaaaaatatccggcagacattgcgaaatgcgaaagcagttttgaaaaagaacgggctgctccttttaaatgaaataagtaatcataatatatattcgcatttgacgttcggccttttagagggctggtggctgtatgaggaccctgatctccgcataccgggctgtccgggcctgtatccggatacttggaaaacggtgcttgagagtgaaggatttcgctatgtttcctttatggctgaacaatcgcatcagctcggccagcagatcattgccgctgaaagtaacggagtcgtccgtcaaaagaagagaacgggggcagaagaagatccaagccatatacaaatgaatgctgaaatcgctcattcacaggaaagcgattctctcatcgaacaaacggcacaatttgtgaagcatacgctggcaaaatcaatcaaactatcaccagaacgtattcacgaagatacgacatttgagaagtatggaattgattcaattttacaggtgaatttcattcgtgaattagaaaaagtgacgggagagcttccaaaaaccattttatttgaacataacaacacaaaagaactcgtcgaatatttagtaaaggggcatgaaaataagctccggacagcattgttaaaggaaaaaccgaagcctgcaaaaaatgaagctcctcttcaaacagagcgtacagatcctaataagccatttacttttcatacacgccgctttgttacagagcaggaagtcacggaaactcagctagcaaataccgaaccactaaaaaaagaaaagacaagtaatttgcaaggaacacattttaatgattctagtacagaagatatcgcaataatcggggtaagcgggcgctatccgatgtctaacagtttagaagagctttgggggcatttaatcgccggagacaattgtattacagaggcaccggaatccagatggcgcacatctttattgaaaacattatcaaaagatccaaaaaagccggcaaataagaaacgctatggcggatttttacaagatatagaggcatttgaccatcagctttttgaggtggaggaaaatcgggtgatggaaatgacaccggaactccgtttatgtttagaaaccgtctgggaaacgtttgaggacggcggctatacgcgaacccggctggataaattgcgggatgatgacggagtaggtgtttttatagggaatatgtataaccagtatttttggaatatcccatctttagagcaggcagtcctcagctcaaatgggggagactggcacattgcaaatcgcgtttcccacttttttaacctgaccggaccgagtatcgctgtcagctcagcatgctctagttcattaaacgccatacatcttgcgtgtgaaagcctgaaattgaaaaactgctcaatggcgattgctggaggcgtcaatttaacactcgatctctctaaatatgattctttggagcgtgccaatctgctgggaagcggcaatcaaagcaaaagttttggcacaggaaacgggcttattcccggggaaggcattggagctgtcctgttaaaaccactttcgaaggcgatggaagatcaggatcatatttacgctgtgatcaaaagcagttttgccaaccatagcggcggaagacagatgtatacagctccggacccgaagcagcaagcaaagttaattgtcaagtcgattcagcagtcgggcattgatccagagactatcggctatattgaatcggcggcaaatggttcggcgctgggcgatcctattgaagtaattgccttaacaaacgcgtttcaacaatatacaaacaagaaacagttttgtgcgataggctctgtcaaatccaatctggggcatttagaggcggcttccggcatttctcagctgacaaaagtgctgctgcagatgaagaaagggaccctggtgccgacaattaacgcgctgcctgtcaatccaaatattaagctggagcacacggctttctatcttcaggaacaaacaaagccatggcatcgcttgaatgatcctgaaactggaaaacaattgcctcgcagaagcatgatcaattccttcggagcggggggagcctatgccaatcttattatagaagaatatatggagacggcccctgagaaagaacatatcgctctccgccagcaggaattcactgccgttttttcagccaaaacaaaatggagcctgcttagctatctagaaaatatgcaattgtttttagagaaggaagcttctctggatattgaacccgttgtacaggctttacacaggagaaaccataatttagagcatagggctgcatttacagtgacatcaactcaagagctgatcgaaaaactaaaggtgttccgaacatcaagagaaagctcactccagcaaggcatctatacatcattcgatttacagccatgtccggaatcagcatctaaggatagagaaataaacgcagcagagcaatgggcacaaggggcatcgattgcttttaaagaagctgatatagggaaccgaacaggctgggttcatctgcctcactatgcatttgaccataatacatcatttcatttcgatgtatcgtctatcaatgagaaatcgtcagatgttgaagacaatatcaatcagccggtcattcaagagcaattcacttatgatgagccttacgttcaaggacacgtcttcaacaatgaacgggtgcttgtcggtgccacatatggcagtctggccattgaagcattttttaacctgttccctgaggaaaacagcggccgtatcagcaaattaagttatatcagtccaattgtcatcaaacaaggcgagaccattgaacttcaggcaaagccgctgcaaaaagatcaagtcatagaactgcaaatcatgtatcgcgagccgtcctctggtttgtggaagcctgccgcaatcggacaatgcggaatcggttcttttgagcccaaaaaagtcaatatcgagaacgttaagcattcattaactaagcttcatcacatcgatcagatgtataaaaccggaaacggtcctgaatggggagagttatttaagacaattactcatctctacagagatcacaagtctatactggcaaaaattcgcctgccccaaagcgggctggcaaacgggcaccattacactgtaagcccattgatgacaaacagcgcgtacttggctatcctcagtttcttagagcagtttgacatgacaggcggcttcctgccgtttggaatcaatgatatccagtttacaaagcaaacgataaaaggggattgctggcttttgattacattggttaagaatacaggtgacatgttgctgtttgatgtagatgtgatcaatgagtcgtcagaaacagtgctgcactactcgggctactcgcttaaacagcttcgtatttcgaatcaaagaggaaatgaaaataaggccatcaaagccagcgatctgaaagctcgtatcagaagctatgtaacagataaactggcagtaaacatggccgatccgtcaaaattgtctcttgcaaaagcgcatatcatggattttggaatcgattcttctcaattggttgcactgacaagggagatggaagcagagacaaagatcgaattaaatccgactctgttttttgagtatccgactattcaagagctaatcgacttttttgcggacaaacatgaagcatcttttgctcagctgtttggtgaagctcatcagcaggaagaacgcctagctcaaatcgaaaaccaaatgaaacagattccggcatacgagacgaacacggataaaacaatcgaacacgcggcagacggcatagccattatcggcatgtcgggacagtttccgaaagcaaacagtgtaacggaattttgggataaccttgtccaaggaaagaactgtgtctctgaagtgccgaaagaacgctgggactggcgcaaatatgccgcagccgataaggaagggcaatcaagccttcaatggggcggttttatagaaggaataggtgagtttgatcccctgttttttggcatatcgcctaaagaagcggcgaatatggacccacaggagtttctgctcttgatacatgcatggaaggcgatggaagatgcaggcttaacagggcaggttttatccagccgcccgacaggagtatttgtcgcagccggcaatacggatacagctgtggttccttccctaattccaaaccgtatatcctatgcacttgatgtaaaagggccaagtgaatattatgaagctgcctgttcctcagctctagtggctttgcacagagctatacaatccattcgaaacggcgaatgtgagcaagccattgtcggggctgtgaatttgctgctttcaccaaaaggctttattggcttcgactcaatgggctatttgagtgagaaaggacaggccaaatcctttcaagcagatgcaaatggctttgtcagaagtgaaggagcaggagttctcatcattaaaccattgcaaaaagccattgaagattctgatcatatttattcggttattaaaggttcaggtgtatcgcatggcggcaggggaatgtcacttcacgcgccaaatccggccggcatgaaggatgcaatgctgaaggcttatcaaggagcgcaaattgatcccaaaacggtgacctatatagaagcgcatgggatcgcctctccattggcagacgcgatagaaatagaggcgttaaagtcaggctgcagtcagctcgaattggaacttccacaggaagtacgggaggaagcgccatgttatatcagcagcttaaagccgagcatcggacacggtgaactcgtctcaggcatggctgctcttatgaaggtcagcatggcgatgaagcatcaaacaataccaggcatatccggattttcgtctttgaatgaccaggtgtcattaaagggcacccgtttccgagtgactgccgagaatcagcaatggagggatttaagtgacgatgcaggcaaaaaaattccgcgcagagcgagtatcaacagctatagctttggaggcgtaaatgcgcacgtcattttagaagaatatattcctttaccaaaaccaccggttagtatgagtgagaatggtgcccacattgtagttctttctgcaaagaatcaagacaggctaaaagcaattgttcaacagcagcttgactatctgaataaacaacaagaactgtcattacaagattatgcttatacactccaaaccggccgagaggaaatggaagaccgcctggcgctcgtcgtccgcagtaaagaagaactggtaatcggcttgcaagcctgcttagctgcggaaaaaggcgataagccgaagagttctgtacctgtctttagcggaaatgcagaaaatggctcgtcagatctcgaagccttgctggatggtccattaagagaaatggtgatcgagactttgttgtctgaaaacaaccttgaaaagatcgcgttttgctggacaaaaggggtgcaaatcccatgggagaagctttatcaaggaaaaggtgcccgcagaataccgttgccaacctatccatttgaaaagagaagctgctggaacggctttcaagcagtagagaatacgccttctgtttcacaggatgagcgtatcaacaacagcagcgatcatcacatattagcaaatgtactagggatggttccgggtgaactgcagcctcataagccattgcagcagtatggatttgattcaatttcttgcatacagttattacagcaattgcaatcaaaggtggaccctctcattgccttgacggagcttcaagcatgccatactgttcaggacatgatggacttgatcgcaaagaaaaaggaggatacatccttacaaaatgatcaagctcgcacgtttccggaattaataccgttaaatgacggcaagcgggggcgccctgtcttttggttccatggcggagtaggaggagttgaaatctatcagcaatttgcacaaaagagccagcgccctttttacggcattcaagccagaggattcatgactgattatgctcctttgcacggaattgaacaaatggcttcctattatatagagatcattcgatccatacagcctgaaggtccttatgatgtaggcggatattccttaggcgggatgattgcatatgaagtcacacgccagctgcaaagccaaggccttgctgtcaaaagcatggtgatgattgactccccatatcgttctgagacaaaagagaatgaggcatctatgaaaacgtcaatgctgcaaacaattaatacgatgctggcatcgattgcgaaacgggaaaagcttacggatgttctcatcagccgtgaagaggtggacataagcttagaggatgaagaattcctggctgagttgattgacttggcaaaagaacgagggctaaacaaaccagataagcaaatacgtgcgcaggctcagcaaatgatgaaaacacagcgcgcctatgatttggagtcgtacactgttaagcctctccctgatcctgagacggtaaaatgttattatttccgcaacaaaagcaggtctttctttggtgatttagacacttatttcactttatcaaatgaaaaagaaccgtttgatcaagctgcctattgggaggaatgggagcggcaaattcctcatttccacctggtggatgtcgattcaagcaaccacttcatgatattaaccgaaccgaaagcgtcaacagccatgttagaattttgcgaaaagctctattcaaacaggggagtagtgaatgcgaatttccttaaggctttccggaagaaacatgaagcgagggaagaaaaagaaacagatgaattggtgaagcgctgagaaaacacaaacgccccctcttttaaaagggggcgttttgaatgttattttgaaagtgaaacagggagactttctaatcctcttaaaaagacattttttctccattgaatgtcatcaggtgcaaccgcaagttcaatatcaggaaatctcttcaaaagtgcgttaaatgcaatgtggccttccagcctggcaagaggcgctcctaagcagaaatgaatgccaaaaccgaaagaaatatgtctgttaggcgaccggtttatatttaatatttcggggttctcaaaaaaattcgggtcgcgattggcagatccgatccctataaaaatcatgtctcctcttttgatcgaatgccccttatatgtaaagtcttcgatggcccaccgatttgccatcataacgacaggtgaggtgtatcgcagcaattcttcaaccgctgtagcgatcatttcaggctgctgcttgagcttctcacattccttcttgtgctgcagcaatgcgagggtgcctgagccgagtaagttaacagttgtttcaaggccggctacaacgagcaagaacagcatcgaatagagctctttttcgcttaacttgctgccgttttcctcagcatgcacaagtttgctgattaaatcgtcttttggctttattcttctgtcatggatcagcttggcgatataatctttaaattcacgaagagcctgatttgtcagctctctattaccttcagaggtatcaaccatcgcattggtccagatttgaaactgtgaccgatcttcttttgggattcccatcaattcagatataacaataaaaggcaaaggggaagcgaaggatttcatgatatccgctttattttctttttccatttcatctaaaagctgttcagcaatttgttcaatgctgccgcgcagattttcaatggttcggggagtaaatgcttgatgaacaagtgatctcaggcgggtatggtcaggtgtgtcttttgccagcatatgatcggatacaaaatcgatatcttcactaacgttgagcattttgatttgttcttggttcatcacattttttacgtctcttgtaattcgattgtcttttaaaaaggccatacaatcatcgtatcgggtaattaaccaggccggatatgtggctccgaaccgttttaattcaaatcggtgaatgggctcttcctctctaaatcgtcctaaaactgaaaaaggattgtgatgaaactctttaccatgcggatgaaacatcaatttttccatttgcattctcctcgcctaatagggtaaatagatgaatcaaattgctgaattagtttacaaaaaacagaatgatttgaaatgtaatcctgtctctaaaactatatatctatcttaggcgtcattcaatagggagaagaacgaaaaaagtgaaaaaacggctcgatataaagcagcgcctttgaacgaaagctcaaaggcgctacgctgtattattttgatgaaagtggctgtcagctgtgctggatatcaattgtatatactgcacgatctgttacgaccttcaatccttcgttttcttggtgaatatgaagctcacctaataaaggaatctcataggcattttgcggaagcggtacgtttccgtcctcagtgaatgttgttccttcgccttctaaaacaagctcttctttcgcaacataatcatcaggatgattcgtactgcgtatagccactttttgaaggtggagaacaatctgatccaagtctgatatctcttcatcatgggtcaattcaccttttctaatatcaagcgtctggccgacttttgattccagccattgagaaagctgtgtattcgtgtgtgccatcaatattcctccttttgatctacacgatactattcccaattgctgcatcttttacacgggaaagagccgccccactctttatgtatgaaacagttcgctgttgagtgccttgatatagcgtacggcagaacgctggaccgattcgtcggcattttctttgacaactttagagaaagcattgtaaagccggttgaattgaagcggttttactttggctgctatttcttcaactttggaggcgggaaggggaatgagatttgggtagctgtacataaagctgacccagtttcgatccgccgcaaccgtaatgatatctccggtcaatagacagcctttcccttcattgcccttgctccaatgcaaaacagcaccgcctttaaaatgtccgcccagtcggtaaaggtccagtcccggcttcatattgagcgtttcccctgaccagaagtgaatgtgattgcttggccttgtcacccattctttatcatcctcatggatatagatcggcgcctgaaacgcttcagcccactcaacctgagtagagtaataatgtggatgagacaaggcgatggcttgaataccgcctaattcgttgatttggtcaattgtcttttggtcaagatatgtcatgcaatcccacagcacattgaagcccttatgctggataagatgggctgtttgtccgatcgcaaactctggttcagttttgatgctgtaaagatgctcttcttcctttttaaggatgttttgaaggtttcctttctcacgcatgtcttcaagggttgtccaagtttgtccatcgggatgaatatactgtctttcatcctcgcaaatcagacacgagttgggcggatctactgtctgtgcatgttgcacaccgcatgtgttgcagatataataaggcactttcttcacttccttcatctattttccattattttaccttatgattatgaatattcaaacaaaaggccggcagttctgctgagagagaattgccggcttttgatgatgtttattggccgggaacggaattttctgcgttgacagcgcccgctccgtagatattcggatcttcatctttccatttgtccgtgccgtttttcaaaagctcttttacttcatcaggggtaagatccgggttttgctgaagaattaaagctgcgattcctgcgcaaatcggtgttgccatcgaggttcctgacattgtaaagtactgagaccctacacggcttgacttttggagcttatcaatataagaattcggagagcgaagggaaataatattaacacccggcgctaaaatatcaggcttttctttcccatatactgtcgggccgcggcttgagaaggaagcgacagtatcatcatcgctgcttgcagtattgttatcgtcaagcgcacctactgtaatcaccttttcgctcacgcccgggcttgcaatggtctgcgaatcagggcctgagtttccggcagcgacacagacgacaatccctgcgctccacgcttcctcaaccgctctgactaacggatcttcctgttcatgatcatatctaagggcatcgcccccgagcgacatgctaataatatcaatcggttcatcggggttgtcctcattgtattgaatacaccactcaacaccctctataatatctgctaacgttcctgaaccctgcttgtttaatacctttacgccaatgagattggcttccggtgcagggccgcggtattgaccggaagaggatgcgccgctgcttgcgacatcacctgcacagtgtgtgccatgaccattatcatcgtacggctctgttttttgattgaccatgtccgcgaatccgataattctgccttctagatcaggatgcgggtagattcctgtatcgacaacagcgacagtaacaccttttcctgtcagggtttgaccgtttctgacgacttccttcgcatggcttgcttcggttgccgtgtctaaaagcgctttgacttcgcggtttaaatacactttacggatattgctgcattcagagagaagggaatgtaatgctgaaggagtaacttcggcgctgcagcagttgattttgttgaagcggctttttagcttgctgcgtttttctttttgcagcacctctccagctatttgaaggccggtctcgtgacagccttcctcaaattcgataatgactgacattttttttctgttttgcaatttggtttcgaaaaatttatgcaagaagcaaggagtccatttgaagggcttgtaaagctgcaatacggtttcccgtaacggccaatctagcttgtgagcatttgctctcaccatttgtaccatagagtacccaaacatgtattttcctcctattataaggttctctgtatactctatgaacagatgataggtttggtaagtttgtttgtcctctgtaagagacagacaagagtttgtttttctgaatctttcgcattagatacgatagattcagaagctgaggaaatcattggggattgaaaaagaacgtttgttcgtattataatgtgatcatatcaaactgggaaggggagagcaaccgtatgaatttctacttgcaccgatctttggaaagccaaatgccaatcagcattatatatatgaagaaagacggaacgattagtaaaagaacgattattgtgagacagaaaagcaaaacgaaaatcaaagcattttgtttttcgaaacaacaaatcagaacatttttattggactctatcctctcctgtgactttgtgagaacaaataagcaaaatctctattctgcaggccggtaacagctgtccgtctcagcaaccgggcagcctgttactaaaaccctccttaaacctatatacatttatttgccaagtgaggttgttcctaccttttttgtctttcctctcaaccttttttcactcttatttgaaatgaaccgctaataaccgtgacaatcaattgattttttgaaaccgggaactttttcactgatgatattgtgtatacaatggtaagataaaacctattggctaaacctcatataatgaaccgcgccattcttatgaaaggagttaaacatgagaagatttttactaaatgtcatattagtcttagccattgtcttgttcttgagatatgttcattactcattggaaccagaaccatcaaatcagccagatacatattcaaatttcagcagcttggcagagaatgagagcccagccgattacgatatttcatataatgagaaaaaaggaagcaaagtcttaattatgtctccgcatggcggaagaattgaaggcggagtaagtgagcttgtgcgttatttcaataatgaatactctacatacctatttgaagggttgaagtcccatgataaccaaacactgcacattacaagcaccaactttgatgagccattggcaaaaaagaaaatcaaggagcatcaatatgtggtggcttttcacggatataaaggagagaacaagaatacccttgtagggggaacagaccgaaagcgggcgaaaatgattgtgagagcccttgagcggagagggttttccgctgagttagcgtcgtctaaaagcggtcttgctggattgaatgccgaaaacattaataaccaaggggaaacggggctaagtatccagctggaaatcagccgtgagcagagagaagcattttttgatgatttttattataaaaatagaaaatacacaaagaacagtgaattttatgcttatgtcagtgcgatcaaaggtgtcctggaaaaagagtattcgtaacaagcagatcagaagacaaaataagagaagatcagtagactgaaataggataaaaaaggaggcaaaacaatggcagatcatcatttttatttaaaagcgaactggccgggtaaccgtaatgatgtcggtacgatcgaaagcggaaacctgatcacatcgatttccattcctaaagaaatggatggcccgggagaagggaccaacccagatgaaatgcttctcggggcggcagcgacctgttacattattacacttgcagcgatgatggagagaagcgggctggaaaaagaagacttacagatggagtcagaaggcattgtcaacgttacaaaaggagtctttacatacaaaaagatcattcaccgtccctctgtcgtgcttaaacatgatgcttcacaagacgacgtcgcattggcgcacaaactttgtaaaaaagcggagtcgtcatgcatgatttcgcgtgcaattcaaggaaatgtcgagctgcagcttgaagcctctgtgaaactgggttgagaataaagaaaacagacggtcactcacaggccgtctgttttttatcttcagcgtgggctttcgattgatttagcacgaccacgcctgcaatgacaagcgtgagaccgaatacaccttttaaactgatggtttcgccaaaaagcaaaaacccgacaattgctgtaagcgcggtaccaacgcccgaccatgttgcatacgcgcttgataagtcaattgtttttaaagaaaagcttagaaacgtaaaagcagaaagaaatccgactatgactccggcaatgggccaggcttgtgtaaatccttctgaaagcttcaacatcgtgctcccaaacacttcagatacaatggcgagagccaaataaagcaatcctctcatcttcatcactcctttacggccaattaagtaacacgacccctgatagtaataaaagaatcccgataagccctttggcattcagatcttccttgaaccattttactccgatcactgtcgtcagcaccgtgcctgccccgctccaagtcgcataggagaggctcaggggaatatggtttaaagtcagggacagcatataaaaggcgagggaatagccaataacgaccaaagcacttggcttccactttttgaagccatcagatactttcagcatggctgctcctatcgattccgaacatatggcaatcgtgaggaatatatatcctatcaacatcatgaattctcctcactatatttttagattagaaaaaaacttcagctagaaaaatattagtgtatgcctatgtatgagtcaagagattcattttcacacacttaaaaagacccctttttaaggggccttttgcgtttaataataataagggaacggggcatacggataataggggtatccgccatacaaataaggattaaataaagcgcttcctataagcccgcctgcaaggccgccgataaacggtcctccaaaaaatccgaatggccggccaaacccataaccaaatccgggtcttccaaatccgtaaccgaacccgaacggtcttccaaacccaaatggtctcccgaatccgaacggtcttccaaatattcttgtatcttcagggctgaaatgctctaactcgttcatgttttctttcctcctgtaataaagtgtagatgatgcagtgtattcaccctgcccggatttgattgggcgaatcgaggaaaaggaggatgtgaacacattgggcctgtatcagtctgactggtcaaaagcaccgccccacgcacatgcctatcatgtcaaaacaacgagagaacagggccattatcatctcattgaagggtttactcagccggcaaacggatcaaataccgatcagcatacacattactatacagggatcacttcatttgaaaacggccattttcatcggtattacggaatctcagggccggcgattcccttagcagatggcacacattatcatgaaatcgaagaaacgacatatctggcctataacgagccaattgagatccagtacggaggggttgtgtacgatcccggagatgacagaagaaaaacgcatcgtcataccctgaaaggaaagacaagggaaattgtcggcaatgagccgctcggctggtagaaggatgtttaccgatgcaaaaaaagggcaaaatggataggtggttgtccatgttgaatgctataatgggggggagatttataaaagagagtgatacatattgaataatacgaagcagcccgttgtcattttagtcggaccgacggcagtggggaaaaccaatttaagtattcaactagccaaatccttaaacgcggaaattatcagcggagattcgatgcagatttataaagggatggatattggaacagctaaaattaccgaacaggagatggagggagtgccccatcatctgattgacattttagatcccaaagactctttctctactgccgattatcaaagcttagtaagaaataaaatcagcgagattgcaaatagaggaaagcttccgatgattgtcggcggtacagggctttatatacaatctgtgctttacgattatacatttacggaagaggcaaatgatcccgtgtttcgagagagcatgcaaatggccgctgagcgggaaggcgctgactttctgcatgccaaacttgctgcagcagatcccgaggcagcagctgcgattcatccgaataatacaagaagagtcattcgcgcactggaaattttacatacgtccggaaaaacgatgtcccagcatttgaaggaacaaaaacgagaacttctgtacaatgcagtgttaattggcttgacaatggatagagacacgctttacgaaagaattaatcagcgggtcgatttgatgatggagtcaggccttcttccggaagtgaaacgcttatacgacaagaacgtgagagactgtcaatcaatacaggcgataggctataaagagctgtatgcatattttgacggttttgtgacactttccgatgctgtcgaacagctaaagcagaactcgaggcggtatgcgaaacgccagctgacgtggtttcgcaacaaaatgcaggtcacatggttcgatatgacaccgcctgttgatatggagctgaaaaaaaaggaaattttcacacatatagcaggaaaactcgaactttaatcgaaactgtatgatatagagaatcaaggaggacgaaacatgaaaccgattaatattcaggatcagtttttgaatcaaatccggaaagaaaatacgtatgtcactgtttttttgctgaacggctttcagttgcggggccaggtgaaaggctttgataactttaccgtattgttggaatcggaaggtaagcagcagcttatatataaacatgcgatctcaacgtttgcgccgcaaaaaaacgtccagcttgaactcgaatagatcaaaaaatgccatgtcaagacatgaggaaaggctgccgggggttcccggcggccatttttaacatgaatccacttttgctccaagctttttgtgtaagctgaccatgccaaggcacggtctttttttatgagaacaacatacggaagtgaaaatggtatattatgtataaaatgaatttgggagtgatcgaccttgtttgaaagtgaagcagaactgagacgaatcaggattgcacttgtatggatagctgtctttttactgttcggggcgtgcgggaatcaagataccattattgaaacagacagcggcaattcagactatgaaacgcctcagcccacctcgtttccacttgaacataaccattttggcgttatggaggacggctatatcaaaatttatgagtataatgagtcccgcaatgaggtaaagctgaagaaagaatacgcggatgatgagcttgaataaaattcacaagcattcgaatttacaaagcggattccagccgctaaactaaatacagacacagatcaaacagagggtgaaaacatgaagcataaagtgatcgtgaatcattgggaagaaatttgcgaagatgattcttgctatgaatacggaacaagtatcattgtgaacggaaaagaattaatcagagaagcgtcaattatcactgctttgaaggcggttttagaagagatcggcgcggatgttgaaatagaagaaacagtagagagcgaaaaatgctgtgatagcttaagaaaaaaaaatctagactactaagcagttttttttcatgttatgataaacatcggctaaaaaacgacaccccgagtaggatgagagatgattctcgttctgctctcttttttgggccctaatgagtctgcccatttgcctgatttgatcaaaatatgaatttttcataaaaacgaatctatatattgtgtttttgctagagggtagtatactgtatatagtgttagtgatgagagattcatattttttgataggtcgtgataaaacgtggtacaaatcatatttgattcgaaaacagggaatgttcagcggtttgtgaataaaacaggctttcagcagatacgcaaggtggacgaaatggaccacgtggacactccgtttgttttggtcacctacacgacaaacttcggccaggtaccggcatcaacacaatcatttctcgaaaaatacgcccatctcttattaggagtcgctgcgagcggcaacaaagtatggggcgataactttgcaaaaagcgccgataccatttcaagacaatatcaggtgccgatcttgcacaaatttgaactcagcggcacatctaaagacgttgaattgtttactcaggaggtagaaagagttgtcacaaaatcaagtgccaaaatggatccagttaaataacgaaatcatgatccaaaaagatggaaaattccagtttgataaggataaagaggctgtacatagctattttgtagattatatcaatcaaaacacagtcttctttcacgatttaaaagagaagctggattatttggttgaaaaccaatactacgaagaggaattcttaagcctttattcttttgaagacattaaagaagtgtttaagacagcttacgctaagaagtttcgttttccttccttcatgagtgcgtttaaattctataatgactatgctttgaaaacgaatgacaagaaaaaaatcctcgagcgttatgaggaccggatctcaattgttgcgctgttcttcgctaacggcgacactgagaaagcaaaagaatatgtaaacctgatgatcaatcaagaatatcagccgagcacaccgacatttctgaacgccggcagaaaacgccgcggtgaacttgtgagctgcttcttgctggaagtcaatgattccttaaatgacatttcaagagcgatcgatatctccatgcagctttctaagcttggcggcggggtttctcttaacctgtccaagcttcgcgcgaaaggtgaagccattaaagatgttgaaaatgctacaaaaggcgttgtaggcgtcatgaagcttcttgataacgcgttccgttatgctgaccaaatgggacaaagacaaggctctggcgcggcgtacttaaatattttccaccgcgatatcaatgattttctcgatacgaaaaagatttcagcggatgaagatgtgcgcgtcaaaacgctttcgatcggtgttgtcattccggataagttcgttgagcttgcacgcgaggacaaagcggcttatgtattctatccgcacacgatttataaagagtacggccagcacatggatgagatggacatgaacgaaatgtacgacaaatttgtcgacaaccctcgggtgaaaaaggaaaaaatcaacccgcggaaattgcttgaaaaactggcgatgcttcgttctgaatcaggctatccatacatcatgttccaagataacgtgaataaagtgcatgcgaataaccatatttccaaggtgaaattttctaacctttgctctgaagtgctgcaggcatctcaagtttcttcatacacagactatgatgaagaagatgaaatcggtctggatatttcctgcaacctgggttcgcttaacattctcaatgtcatggagcataaatcaatcgaaaagacagtcaagcttgcgacagactctttaacacacgtgtctgaaacaactgacatccgtaatgcgcctgctgtaagacgggcaaacaaagcgatgaaatcaatcggcctcggtgctatgaaccttcacggctaccttgcgcaaaacggcattgcgtatgaaagtccggaagcgcgtgactttgcaaacacgttctttatgatggtgaacttctactccatccagcgttctgcggaaatcgcaaaagagaagggtgaaacgtttgatcaatatgaaggctcaacctatgcgacaggtgaatactttgacaaatacgtttctactgatttctcaccgaaatatgaaaaaatcgctaatctgtttgagggtatgcatatcccgacgacagaggactggaaaaagctaaaagcatttgtggctgaacacggtatgtatcacagctacagattatgcattgcgccgacaggctctatctcatacgtccaatcaagtacggcgtctgttatgccgattatggaacgcattgaagaacgaacatacggcaactcaaaaacgtactacccaatgcctgggcttgcatctaataactggttcttctataaagaagcctacgatatggacatgttcaaggttgtggatatgatcgccactatccagcagcacattgatcagggaatcagctttacattgttcttaaaagacacaatgacgacccgtgatttaaaccgaatcgatctgtatgcacatcatagaggtattaaaaccatttactatgcaagaacgaaagatactgggcaagacagctgcctttcttgtgttgtttgattaaaggagagtttatagtgacaaaaatttatgacgcagcaaactggtcaaagcatgaagacgattttacccaaatgttctataaccaaaacgtgaaacagttctggcttccggaagagattgctttaaacggcgatctcctcacatggaagtacctcggaaaaaatgagcaggacacttatatgaaggtactggccggacttacgcttcttgacacagagcaggggaatacggggatgccgatcgtggctgaacacgtagacggccaccagcggaaagcggtgctgaactttatggcgatgatggagaacgctgtccatgcgaagtcgtactctaatattttcatgacccttgcaccgactgaaacgattaatgaagtatttgaatgggttaaacaaaataaatatttgcagaaaaaagcgcaaatgattgtcgggctttacaaagccattcaaaaagatgatgaaatttcactgttcaaagcgatggttgcttccgtctatctggaaagtttccttttctacagcggtttctattatccgttatatttctacggacaaggaaaactgatgcaaagcggtgagatcattaacctgatccttcgtgacgaagcgattcacggcgtgtatgtcggtctccttgctcaggaaatttataataaacagacagaagagaaaaaagcagagcttcgtgaatttgcgatcgaccttctgaatcagttatatgaaaatgagcttgagtatacagaggacttgtacgatcaagtcggactctcacacgatgtaaagaaattcatccgctataatgcgaataaagcgctgatgaatcttggatttgatccatacttcgaagaggaagatattaatccgatcgttttaaacggattaaacacaaaaacaaaatcacatgacttcttctctatgaaggggaatggttataaaaaagcgacagttgagccgctcaaagatgatgacttttattttgaagatgaaaaagagcagatataatatctgctcttttcggcttgaaggttcaaatgaggaggacgcagtacccatgggaaaaatggacgaaatgattttagttgccccacgcgatgatgtgtttaaaaaagaaagcttaaccttccagggcgtgtacagtgaagatagcagagtagccgaaatcatggctcagattgaagcggcctatcgtgaaatgagaagaggggacgcagaagaagatccgcgtttcaagcagccgataccttatgtcgtcattaagcgtgaagatgaagtttttctttacgagcggctggctggcggcggtgaatcacgactgcacaacaagctttctctcggctttggcggtcatatgaacgccatcgaaggggcagcttcatttgctgaagtcttaaagctgaacacagaccgtgagcttgaggaagaactgcaaataaatgaagaagataaacaggcgattgtcacactgggattgatcaatgatgatgaaaatagtgttggcaaagtgcatatcggtattctttctgcgcttcaattaaagcctggcgcacaagtggaagtgaaggagaaagaacaaattgcgggtaaatggatgaaagtttctgaattaaaacaggatgacatctacaaccgtctggaaacatggtcacagtttgttgttgatattcttgaataaaaaaacccggtttctcgcgatgaggagccgggtttttttatgagacgctcgtccccgtctcggctatgattctaggatcacaatagcgtcaaagccggcatttttcgctctggcagcgagagtgtctgcattgtcattggatgaaaatgcgccaatctgcactttgtaaaatccgtcctttaaaaggacaatcgagtcaaaacctttggcttcggcattacttgcgagcgagtcggcattcgctttggctttaaatgcgccgatttgaaccttatataaccctgagctggaagtctttttaaggttaaaggcttgctccagcccgtttgcatgtcctctcgctaagctttgaataaaactgctcgttttcagcttatttgcatcggaaacggtatcaatgaagccgttctcggtcaagagggcaggcattgccgactcccttaggacgtggaagttcgctgtttttttgccgcgatcggcaaagtcgacagcttgtatcacttcagagtgaattgccgattgataagtcgtcgtcggggctcctacatctggataaatatagctttcaaaacctgtgcctcccccggaattaacgtgaatggacaaaaagaaatctgctccccagttatttgcggcatttgtccggtcgtttaagctgacatattggtcgcttgtccggctcagcagcagagaaacgccttcatattcattagttaatatcgtacgtaaggctaaagcgatttgcagggttaacgttttttcctgaaggccattacctgttgcgcctggatcagacccgccatggccaggatcaataaaaattttaaccatttttcatcacctcattacaggatatgaaaaaacacagcttctgcttgtacgattatcattcaactgaaaaatgaggaaataaccctttcacatccagaaattatttctcgggaaagcgcacaattcaacatgaagcgacaacagatacggtccgacatgaaatctgtgcatacgccatatgtttgtatgtactttgagttcggttaacctgcactgattcctgttggttttaagctttgcgttcatattaaatcaagcatttgaaacgtaaattgatgagaaaagctcctttcattaaagacaccactttataaatcgaaaaaaagaaaaacacttcaggtatcttagggcgggtaatacgcttcgtacaaaaaacagcccgttgcatgaaaaaaggattggcgaatggagaaaataatgagaaagaagctcactataatactttgacaaaatgattaaaaacaaaatctcatggtttgtccaccccatgtccgtgaatacaataagaaataaagtatttctcgggaaagcgcaggattccttattgttcccgaaaaaagcaattgtttcgacacatgataggcgtttgtcacaatcggcatccgcttgaatatcatatagagagaacagagaggtgaagatgttggagcgcgctgtgacttataaaaacaacggacagatcaacattattctgaacgggcaaaagcaggtgctgacgaatgctgaggcagaggcggaatatcaggctgcattgcaaaaaaacgaagcaaagcacggcattttgaaggaaatcgaaaaagagatgagcgcattagttgggatggaggaaatgaaacgcaacatcaaggaaatatacgcctggatttttgtgaaccaaaaacgcgcggagcaaggcttgaaggttggaaagcaagcgctgcacatgatgtttaaaggaaatccgggaacgggaaaaacgacggttgcacggctcatcggcaagctgttctttgaaatgaatgtcctgtcaaaaggccacttaatagaagcggagcgggctgacctggtcggggagtatatcggacacaccgcccaaaagacgagagatttaatcaaaaagtcattaggtggcattttgtttatagacgaagcctactcgctggcaagaggcggcgaaaaggactttgggaaagaagcgatcgacacacttgtaaagcatatggaagacaaacagcatgagtttattttgatactcgctggatattcacgggaaatggatcattttctctcgttaaatcccggtctccattcaagatttcccatctccattgattttccggattactctgtgacccagctcatggagattgcgaaacgaatgatcgatgaaagggaataccagctcagtcaagaagcggaatggaaattgaaagattacttaatgacagtgaaaagcacgacaagccccattaaattcagcaatggacgttttgtcagaaatgtgatcgaaaaatcgatcagagcacaagccatgaggcttttaatgggagaccaatacttaaaaagcgacttgatgaccatcaaaagccaagatctttccattaaagaagaagcatctggatctgcatagacctctcagtttttgagaggtctgttttttgctcgtatttccgcttttcaaagcaatcgatttgtggtatacacatgcagggtttggtatgataatactactgcccaatatgcaaaagaaaggaacatccatttgaacgaacaagaaacgattcaggagaaagccattttagtcggatgtcagctgccgcatatcacggatgagcattttgaaaattctatggaagagctagcatctctgacgaaaacagcagacggaaaagtactgaccagcgtcacacaaaaacggaacagggctgacgccgctacatatataggaaaagggaaggtagaagagctgaaggcactggtggaagagcttgaagctgatctcctcatctttaatgatgaactgtcgccaagtcagctgaagtcattggcaacagcaattgaagtgaagatgattgaccgcacgcaattgatattagatatttttgcaaagcgggcgagaacgagagaaggcaaacttcaaattgagctggctcagctgcaatatgcactgccgcgtctgacgggacaagggatcaacctttcccggcaaggcggaggaattggggcaagaggtcccggggaaacgaaactggaaaccgaccgccgccatatcagaaatcgcattcatgaaatcaacacacagctttccactgtcattcgccatagaagccgataccgtgaaagaagaaagaaaaacggtgtgcttcaaattgcgcttgtcggctatacaaacgcagggaaatcaacatggttcaaccgcctgacgagtgctgacagctatgaagaagacctcctgtttgccacgctcgatccaatgaccagaaaaatggtcctgccaagcggctacagtgttcttctttcagatacagtaggatttattcaggatcttccgacgacattgattgctgcattccgctcaacgcttgaggaagtaaaagaagcggatttgatcctgcatttaattgattcttcaaatgaggattatgcgggacatgaaaaaacagtgcttgggcttctcgaggagcttgaagcagatgatatcccgatgctgacggcttacaataaacgtgatcaaaaactgcctgattttataccgtccgccggaagggatcacattatggtcagtgcgaaatttgaggacgacgctgcagcctttaaagaagcgattcagcgctatttgcgccaagaactgttaacgtcttttgaagcacatgtgccggcaagtgaagggaagctcctttccagaatcaaatcggaaacgatgatagaccgcttctattttaatgaagaaaatgaacagtatgacatatccggctatgtccaagaagagcaaagtatcatcggtgaattaaagaagtatatgtaggaaggaaaaataaagacatgtttgacacattaacacacggagaattattgaagaaaacggcaatggaagtggaagcggacattgccggcattcataaacaaatagaagaaatcagcgagcgaaatgagtggagagtgcttcaaagctatagaaaacacaaagtaagcgacactcatttcacgccgtctactggatacggctatgatgatatcggaagagacacgcttgaaagcatatatgcggatgtgtttggcggagaagcggggcttgtaaggccgcaaatcatttcaggcacacatgccatctcaattgctttgttcggtgtcctcagaccgggggacgagctcctttatatcacgggcaagccgtatgatacgctagaggaaattgtgggcgtcaggggtggagaaaacgctggttcgttaaaggattttcaaatcggctataatgcggttgatctgacgaaagacggaaagatagactatgatgcagtcgccgctgcgatcaatccgaagacaaaagtaatcggcattcagcgctcaaaaggatatgcgaatcgcccttctttcttaattagtgaaataaaagaaatgatccgttttgtaaaagaaatcaatgaaaatctgatcgtctttgtggacaactgttacggagaatttgtggaagagcttgagccttgccatgtcggagccgacctgatggcgggatctctcattaaaaatcccggcggcggccttgcgaaaacaggcggctacctcgtcggaaaagcgaaatggattgaagcttgctcataccgtatgacgtcacccggcatcggcagagaagcgggggcatctctttactcgctccaagaaatgtaccaaggcttctttttggcgcctcatgttgtgtctcaaagtctaaagggagcggtgtttacagcgagattccttgaaaaactcggcttcacttcaaacccgaaatgggatgcgaaaagaacggatttaatacaatccgttgagttttctgacagagaaaagatgattgctttttgccaggctattcaatttgcatcgccaatcaatgctcatgtgacgccttatccagcctacatgcctggatacgaggatgatgtcattatggcagcaggcacgtttattcaaggagcaagcatcgaattatcagctgatggccctatccgcccgccgtatgtagcgtatgttcagggaggattaacctattcgcatgtgaagaatgccatatgcagtgcagtggattcattgatggaaaagcaattaatttaaatttttaaaaatttctctggatttgatgttaagaatccttacatcgtattgacacataatataacatcacctataatgaaactaagttaagaaaaggaggaaattgagatgagtgataatattcgccgctcaatgcctttatttccaataggaattgtcatgcagttaactgagttatcagcaagacaaattcgatattatgaggaaaatggactgatatttccagccagaagtgaagggaatagacgattattttcatttcatgatgtagataaactgttagaaatcaagcacctgatagaacaaggtgtaaacatggcaggaattaaacaaattctggcgaaagccgaagccgagccagcacaaaaacaaaacgagaagacgaaaaaaccaatgaaacatgatctgtccgatgacgaactgagacagctcctgaaaaacgagctcatgcaagccggccgttttcaaagagggaatacattccgtcaaggcgacatgtcccgcttctttcattaatccgttagcaactgttttgctatatacatttaccttttaagaggaggaattttaccaaatggcaaagtacactagagaagatatcgaaaaattagtaaaagaagaaaacgtgaagtatatccgccttcaatttactgacattcttggaacaatcaagaatgttgagattcctgtaagccagcttggaaaagcgcttgataataaagtcatgtttgacggttcttctattgagggattcgttcgtatcgaggagtcagacatgtacctgtatccagatctaaatacatttgttatcttcccatggacagctgaaaaaggtaaagtagcacgtttcatctgtgatatttacaatccggatggcacaccttttgaaggtgacccgcgaaacaacttaaaacggattttgaaagaaatggaagacctcggatttagtgattttaaccttgggcctgagcctgaattcttcttattcaaattggacgaaaaaggcgagccgacgcttgaactaaacgacaaaggcgggtatttcgacttagctccaactgatttaggagaaaactgccgccgcgatatcgtgcttgagcttgaagagatgggctttgaaatcgaagcatctcaccacgaagtagcacctggtcagcacgaaattgactttaaatatgctggagcagtccgctcttgtgatgacatccaaacatttaaactagttgtcaaaacaattgcccgcaaacacggcctgcatgcgacatttatgccaaaaccattgttcggcgtgaacggttctggtatgcactgcaatctatcactcttcaaaaatggtgttaacgcattctttgatgaaagcgcagatcttcagttaagtgaaacagcgaaacacttcatcgcaggtatcgtgaagcacgcaacaagctttacagcagtaacaaacccgacagtaaactcttacaaacgtcttgttcctggctatgaagcaccttgctatgtagcatggagcgcgcaaaacagaagcccgcttatccgtatcccggcttctcgcggcatcagcacacgtgttgaagtacgcagcgtagacccagctgcaaacccataccttgcacttagcgtattgcttgctgcaggattagacggaatcaaaaacaaactggaagcgccggctccaatcgaccgcaacatctatgtgatgagcaaagaagagcgcatggaaaacggaatcgttgaccttccagcaacacttgcggaagcgctagaagaattcaaatcaaacgaagttatggtcaaagcgctgggcgagcacctattcgaacacttcatcgaagcaaaagaaatcgaatgggatatgttccgcacacaagttcatccttgggagcgcgaacagtatatgtctcagtattaatctctcaatcccttggcactaaaggtgtcaggggattttttatgttaataggtaataaattatggagcggcactgctaaaaagcagggtcacttttagtctatgtcactaataattctatgtactaaattttcaattagggaaataattccacgcttaaggaagcaatacgcataaataattcgacaaattctgtgataattccattgttcaatacttctaccagcaataataagatgagcaaggtggatgattatcattgacatcataaccaaaaaaatccataattacgttgaaatctaaatcaattttcaaaaaggagatttccatgaaaaaattgactatcttttccgggggattaggagtggttttttctgtactggctcaactgtttgcggttatagatgactcttacactttggggaatttatggtttttaggtgctttggcgggaattataaccatgcttgcttcaatccagacaaataataaaccaatcttcagcattttattaatttctagttcagtaataggtctacttggaactggttttgtatacatcataccaacactgttcaatataataataatttataaattttcaaaagtaagccaataagccaatgggaaaattaaggttctttttttatttaacatccctttgacaaggtcggtaatgaatcgcagaatgttgcaactggtccacacagttggggaaatcgtgggcatgattatcgaacgccatgtttctaggataccggaattgaaacatttgctgagtcatttcgtgaagttgatcaccaaatgtccatttcaatagaggcacgtctaaagaagctatcataggaggacaatactgtgtggaaagctttaagtcaattactcaagaaacagaaaaatcaaagtccaagcgatgagggttatatacagattccagaaaaggatataaatcaagaattaaagcaagtgatatttgagttggagagcctgggggaagtagtatcgaaaaagctgcagaataagtatgcaggtgtttttgaagctcaggataaaccaaatctcagcatcaaagtttgtagagacatagatggagatgtgctaaatgattttacagctgagagatgttttgaaaaagaataccgttcacaaatagcaattaattactatcaacctgcaatagtctgtgatgaagaattagcctgtttcacaatggatttgtggtattactacggtggatataaagggacgggttgtggaacattattcgatttaaataataatgacttagaaaaagaaattgaagagacgctaatatttttgctcaatgacaaacaattcgagaaataaaaaagaaggccgcaaagcgctttcaatcaactgatgtagctaagaaaagcgtttaagaattagctgacttgggtgacagcgagttttccgggaagggtgcagacaacattaaagcattttatcatgatcatgccggcattacagatcaatgtatcgatcggattgacatggaaattgctttcttaagcatcatttttgcaaaacttgtagatgcaaagatgtaagatacttacatagaagagtcatttttaaaacatgagctggctaacgattacacaaaatcaaaattcattatgtctgaacaaaagaaaacgatgaaagacattctgaataacaccattgaataaatatcttaaggataaaaaagtgaattggtcaaaggaattgaaatatttaaaagggctattaggctccaaaacgcttgcaaaagatttaaaaatccaaatgaatgtttaagtatttgttttcaggtttagtgataactatgtctatacttaaaattatatccatttgataatccagagagaaaaaccttaatgtcccgtttaataggggaaagaactatgatatctcctagtcaccaatatataagaaatgggacaagcaaagatttgttaggcgcaactttaattaaataaataaaatagcaatcttgtgataatagtagctaatctgttggtacccttgccagcagcttttataaaacgtttttttgactttgagttgctctttcttagtctgataaaacttcttcattagcgtccgcttctcaatctaggatatgtgaaatcctcaatcgcattgcaaattcccgaaaagctttttctgtctttaaatcaagtccaaacttcattctctcggccgtctaagaagctaatttactgcttcttcttttcaggttccatgtaccggtctttacagtgtctgggagaaaaagtgatttggggcattcatctttttttatttcagctagcgaagtgaaagaccgatggcatttttcctgcatataatagctggaactattcaaaaaggcagggaatgaagttgagtgaatgatgtgattgtaaatggaggttttgaaacaggcaatctgacgggctgggcttctgcaaatacgtccgttattaatacttttgcccattctggaagatattccgcacagtttttcagtaaccagccgtatgcttttttagggcagatcgtgcctgtcgtttctggacaatctctgatattcatcgtttcgcttgggagaattggaaacaattcaagtccccaagtaactatacaaattttatttgttaacagtgaaggcgaagagattgaaggcggacaggaaattatcattgcttccggaaatttgccaaatgtctcatttaatacatggaatgaaatatatagaacaattgaaacccccgctgaagcagtaaacgcagtggtggtaataagcaaaactacttttgggtctgttctaattgatgatgtttctttaatagagtctgctgggggaattggaccgactggaccaacaggtgcaacgggagcaacaggcgcaacaggcgcaacaggcgcaacgggagcaaccggagcaacaggcgcaaccggtccaactggagtaacgggagtaacaggggcaactggtgcaaccggatcaaccggatcaaccggatcaaccggagaaacaggatcaacgggagtaacaggggcaaccggagcaacaggagtgactggatcaactggcgcgaccggagcaaccggatcaacgggatcaaccggagaaacaggtccaacaggaccaaccggagaaactggagcaaccggaccaaccggatcaaccggagttactggagcaattggagccactggcgcaacaggatcaactggtgcaacgggagtaaccggagccactggagtaacaggattaactggaccaaccggagaaactggtgcgacgggagtaaccggagccactggagccactggagtaacaggattaactggtgcgacaggagaaactggaccaaccggagcaacgggatcaaccggagtaacaggtgtaacaggatcaactggagtaacaggatcaacagggtcaacaggatcaacaggaccaaccggtccaacaggagtaacaggatcaaccggagaaactggcgcaaccggatcaactggagaaacaggagtaacaggatcaaccggatcaaccggagaaacaggtccaacaggaccaactggtgcaacgggagtaaccggagccactggtgcaacaggaccaactggtgcaacgggagtaaccggtccaactggcgcaaccggagcaacaggcgcaaccggtccaactggagtaacgggagtaacaggggcaactggtgcaaccggatcaaccggatcaaccggagaaacaggatcaacgggagtaacagggtcaaccggagcaacaggagtgacaggtgcaaccggatcaaccggagaaactggtgcgacgggagcaattggtgcaactggtgcaaccggagcaacgggagtaactgggtcaaccggagcaacaggagtaacaggtgcaaccggatcaaccggagaaactggtgcgacgggagcaattggtgcaactggtgcaaccggagcaacgggagtaacaggatcaactggaccaaccggagtaacaggtgtaacaggtgcaaccggatcaactggtgcaacgggagtatccggagccactggagtaacaggattaactggaccaaccggagaaactggtgcgacgggagtaaccggagccactggagccactggagccactggagtaacaggattaactggtgcgacaggagaaactggaccaaccggagcaacaggagtaacaggatcaaccggagaaacaggtccaacaggagtaacaggatcaaccggagaaactggcgcaaccggatcaactggagaaacaggagtaacaggatcaaccggagaaacaggaccaactggtgcaacgggagtaaccggagccactggtgcaacaggagcaacaggagtaatcggtccaactggcgcaaccggagcaacaggcgcaaccggtccaactggagtaacgggagtaacaggggcaactggtgcaaccggatcaaccggagaaacaggatcaacgggagtaacagggtcaaccggagcaacaggagtgacaggtgcaaccggatcaaccggagaaactggtgcgacgggagcaattggtgcaactggtgcaaccggagcaacgggagtaactgggtcaaccggagcaacaggagtaacaggatcaactggaccaaccggagtaacaggtgcaaccggatcaactggagaaactggagaaactggagatacaggaccaaccggagaaactggtgcgacgggagtaaccggagccactggagccactggagtaacaggattaactggtgcgacaggagaaactggaccaaccggagcaacgggatcaaccggagtaacaggtgtaacaggatcaactggagtaacaggatcaacagggtcaacaggatcaacaggaccaaccggtccaacaggagtaacaggatcaaccggagaaactggcgcaaccggatcaactggagaaacaggagtaacaggatcaaccggatcaaccggagaaacaggtccaacaggaccaactggtgcaacgggagtaaccggagccactggtgcaacaggagcaacaggaccaaccggtccaacaggagtaacaggatcaaccggagaaactggcgcaaccggatcaactggagaaacaggagtaacaggatcaaccggatcaaccggagaaacaggtccaacaggaccaaccggtccaacaggagtaacaggatcaaccggagaaactggcgcaaccggatcaactggagaaacaggagtaacaggatcaactggcgcaaccggagcaacaggcgcaaccggtccaactggagtaacgggagtaacaggggcaactggtgcaaccggatcaaccggagaaacaggatcaacgggagtaacaggggcaaccggagcaacaggagtgactggatcaactggcgcaacaggagtaacaggtgcaaccggtccaactggagtaacgggagtaacaggggcaactggtgcaaccggatcaaccggagaaacaggatcaacgggagtaacaggggcaaccggagcaacaggagtgactggatcaactggctcaacaggagtaacaggtgcaaccggagcaacgggagtaactgggtcaaccggagcaacaggagtaacaggatcaactggaccaaccggagtaacaggtgtaacaggtgcaaccggatcaactggtgcaacgggagtatccggagccactggagtaacaggattaactggaccaaccggagaaactggtgcgacaggagaaactggtgcgacgggagtaactgggtcaaccggagaaactggagtaacaggatcaactggaccaaccggagcaacgggagtaaccggagtaacaggatcaacagggtcaacaggatcaacaggaccaaccggaccaaccggatcaacgggagcaacaggagtaacaggagtaacaggtgtaacaggtgcaaccggatcaactggagaaactggagtaactggtgcaactggagatacaggaccaaccggatcaacgggagcaaccggagaaacaggagtaacaggatcaaagggagtaactggtgcaaccggagaaacaggagctactggtgcaactggagatacaggaccaaccggtccaacaggagtaacaggatcaacaggtccaacaggaccaaccggaccaaccggagaaacaggagcaaccggtccaacaggagcaaccggatcaactggagtaaccggagcaactggagcaaccggaccaaccggatcaacgggagtaaccggtccaactggagcaaccggatcaacgggagtaaccggtccaactggagcaaccggatcaacgggagtaaccggtccaactggagcaaccggatcaacgggagtaaccggagaaacaggagtaacaggattaactggtgcaacaggatcaaccggagaaacaggagcaacaggagcaacaggagcaaccggatcaacgggagaaactggcgcaaccggagcaacaggatcaacgggagtaaccggagcaacaggagtaaccggattaactggtgcaacaggagcaacaggagcaacaggagtaactggtccaacaggatcaacaggagtaaccggagaaactggtgcaaccggatcaactggcgcaacaggagcaacaggtgcaaccggatcaactggcgcaacaggagcaacaggtgcaactggcgcaacaggagtaaccggtccaactggagaaacaggatcaaccggatcaaccggagcaactggtgcaactggagcaacgggagtaactggagccactggtgcaacaggatcaaccggagcaaccggtccaaccggatcaaccggagtaaccggagtaacaggtgcaacaggaccaacaggaccaacaggaccaaccggttcaaccggggcaaatccacagctgttttacagtgaaatagcaggccccgttccgcttgctattaacggtactgaaacgtcgattggtactttaagtgtgccaacagtcgcaggacaattaataaaattagaccttgccatttctgtagatgttacaacgacagctaactcaaactttacttttcaaaccagaatttatagaaacggagtattagtagatacacgctccgtccaaagaaatatcagcgctgcaattacgtcaagatttccaattgctacaacgtatgtagatgctaccacggtcacaggcacgacttcttatgagattaggataatcttcacaacagtaagtaatgtgagtggcagcaacgcactaaacctagatataaatgctattaggttcccttaataatagagaattaaaaaatcacttttttaaaaaaattcaagcatatgaaacaagaaacctacttttaaacagtaggtttctttgtcgtggtattgaaaccttatcatgtctcggaatatccctccaaaaattttttaaggtaataagaatactggtctgtatcaaactcgttgccgcatgcatgtaagacccaaggctctttctgatgagggatgcccactatatatcctttttttctgaactcaaaacattgagaagtatcatataaatgccatccgttaaaaatatcttttcgccatggaacatcgtactgagtcgccagtaataaaccgtctaatgcttgaactgctttcacagtttcatcaatttcatcaaataataaatagttgtacgtgctgcggtattcaatgacttttccggcttttttagaagcctcccaccaaatcccgctttgcggcacttcttcagctcctataacgcctatcatgccaagctgatcattctgctgaaagacatggagaatatcataaataaaggaacgattgatgataaatgtgtcctgatgtaaatacactttatattttgagtcagagtcctccattgccgcctggtagccggacgccatactgtctgcgtctcggatattgattaattctaccttcatatgcggcggtacagaaagagactgaagatgtcttagacagagatcataaagggtatcgtcattcacacatgtaataaagctaattgaattttcgtttgtatgctgattcatcttttctctgcctttatgacatattgataggctctggcctcctcctcaagatctgcatggtgaattcccatgcatgatctgacataagcaagtttgctgatcattttttcataataatgagtcgtaaaaacaataggctcgatttggatgatcttgtagcctgtttcatgaaacatctttttcatttcctccaaggtgaaaaaacggaagtgtgttttatcgagcagccctgcctgtatatacgtccatttgccggacagcagactttcgaaaatcgagatatgtccgatattcgggatgcttgccaagatactccctgtttcttttacataaggcttgatgttacctaaaactgcccacgggtctattaagtgctccagaacatcaccgaagataatgtgatcaaatgtgtttttttgaaaaggcagcttcagtgtttcaatgtctcccgttattacttcgtcaatataatgtgttgctttttcggcagctggtggataagactcgatcccataataggagcaattcgttttttccttcacagctgcgccaaacaagccttcagcacatccgacttcaagaatggttttcgcatgcggttctatcagatcaaatagctgccagttgatgcctttgtaatactctttatcttttagctcatactctttcatagaatcagcaagtgaatttttattgatttccatgatgttcacccccggagccggtctgcatctttagaatatcttcaaaatattttttgttggctagcattcttgaatcatggggacggtattgcaatgccgattcattatgctgataggcaagctgatgctggccgagtttatcgtagcagacggctaattgcaggtggggaagccaggtcgcgcaggcgcggttttgaaaagccaggttttctgctcctttgttttctattgctttttcataccaatagaccgcactctgaaaatcgtttttttctaaaaaagagtatcccagcctgcagcaggtttctgctctaggcggtccatagacgagcgtgtggagcacccagcttaattctttttccttcagccccagtgaatggtagcagtctgctaatttattgcacgctctgatattatcctctacccatccctgcttcgtttgtaaaaaacgtaaatagtactcaatcgcttgctccatttttccgtgatcacacaactcgttcgcatagtaaaataaatctcttggagaaaaatcctttcctgacgaggccattttttcataaattcggaggttgcgatctgcgtcatgactaagtggcaggtgagaaaccgctgcatcactgtggtgaagtttcccatatacttctaggtattcatgaaccgcgccgatccatttaaagctcttttcccgttttacgagccggtatctccttaagctggatgtgacgttattttcttcatcaaaagccaaatggtatttcattgagaccgcgtctatatccggatcaagcgttctttttaaatccaataacagctcttgatctttcttggtaaacacgtcgtcggcgtcaagccataagatatagtcggatgtcgcctgctgaaacgaaaaatttcgggctgccgcaaaatcgtcaatccatttaaaatcaaagattcggtctgtatagcgagcagcaatgtctttcgtcttgtcaactgacccggtatccacaatattgatctcatcagctatctcctgcacagaatctaagcatcggccaataacagcctcttcattttttacaatcatgcataaactgattgaaatcacatcgccacctccgttttattctgttttttctttatggcatggacaaacatgtaatcaatatgggcatgttttgacaagtgatccaaagacaaaccaaattgcccggcaaggaattgaagttcttgtaaaaagagctgtatgtttgattcagtatcggaggaatgggaggtgatggattttatgtcataaaggtattcaggaaatagggtatttacgttgcgaggtgtgatgaaatgtgtgtacgtcgatgcaccacataataaagagaaaaatgtatctgcataggcagtatttgggatgctgcaaatcagcgagccagaaggctttagataaacggcaagagtctcaattgtatgtctgggattttttgagcagtttaaaaggtcaccgatcaaaattacatcgaaaaaggactcagggtaagggaggtcgcatgtttccacatctgccgaaatgacttgttcgtaataggggcttgcaatggtctgtaataactcatccttttcaatcccatacaataaacaggattgccggttcaaaagttctgtccccgcagctcccgtgccgcaaccgatatgtaagatagagtcggcttccgctggcacaagtgctgtcagctggggctgggagtcaaagaatgttgttacatccaccttccatttatcgatgaagcgttgccggttttcttcgtataattgattgatgcttaaatctggattgcctgtaaacgtggcatgaccgtgatggtggacaaacgaatcaagagcgataattagctgataccccgcttgcagtacgcggaggcttaaatcatcatcctcaaatgaaccgcctacaaaacgttcatcaaaaccgccgacttcatccaacaccttctttttgacaagcaggcaaaatccgaccagcctcaatacagcttttgatctgcctcgctgctgcaaacagtaaagacgagaaaaatcttcaatttcttcaacgtttgtatagttaacgggaacttgctgcggaccgctgacataattgcttacaggcccgaccatgccgattttatcatcctgataaagcagcttgatcattggctccagccattgatttgttacaacagtatcattgtttaaaaaaagaatattgtcccctgaggcaacttcaagaccctgattacaggcttttgcgaagccttcgttcgtcttattaaaaatcgccttaattgaagttatctgtttgaggtagtcacgtgtaccgtcatgagagccgttatctataacaattacttctatacagtcattattcgtatgcttccatatgctctccaagcattgttttgttaaagctaattgattataagtcagaacaataatactcgttttcactataacctccgcccttcgccatatcattcggatactatatgtatatcgtaatgttcagacggaatgattctttcctgtaaaaaggagaatgctgcttaaacgtaaaaatgtgaatggttttttaaagaaaaagtcgatgaatttgttttacatttagttttcccttaaggggatcaacaaggttggggaattcagggaaatagggatgataagttgccttaaccagtttgtatgaaagttatatttaattctttctgtactaaatggtgaattaggagttatatatttaaaggagaataccgatgagggcattattttatttaatacgtttatagcaggggagaaggacgaaatatcggtcagataaatttttatataggtttcgtgactttaaagggatcaattatgatttatagaatgttttttgtaactcaaactagttgagtactactttagaaagaatcatcgtgtacatataaacaatgataatttaatgaaatggacatcaatggtgtttccagaacatttaacgtagtttaaataagatttgattgacgtatcagaaattgaaaaaccgtccttagattagcaacatattgaagagatggatcttctagtctatgaggcacttgaatttaacaaagaattgctatcgagactatttgagatgtgtcgtaaatccactaataaaatctgtttttgaagaaatgtttaattcttaaaatggttaatcaatttaagtgcttcatttaagtctcttataagccgataaagtttactggaggacacaaatcataaaaatccccccaaaaaaatttttaagggggaataatacatatttaagaagtgtgacctctacttgcaacttcaaatgagtctttctcaataaaatatccaatatttttactccgactttagaagaagagatcatttgctccaacacaagccctcctatattaaatatgtaatattttatcatatttaaatgaataaggaagattaatgttatcttaaaaaacaaaaaagcctcctgcaaattatgagaagggtaagggaatatttttgagaatcatattccattgcttgttcacagtcagtaatccttgagttgttctagcaagaggcaatattgttgaataagaatagttttaaagaggttattgttgtcttcatattgaaataaagactaagtatattagaggggagttactttaatgcatatcacaacaaaaaggttattgatacgtgaatttgcattcacagattggcaggctgtatatgagtatacatctgatagtaatgtaatgaagtatatacctgaaggggtttttactgaagaagatgcaaaggcatttgtaaataaaaacaaaggtgataacgctgaaaaattccctgtcatactaagagatgaagactgtcttataggccatattgttttttataagtattttggtgaacatacatatgaaattgggtgggtgtttaatcccaattatcaaaataaagggtatgcttctgaggcagcccaagctatcttggaatatggatttaaagaaatgaacttacataggattatagctacgtgtcaacctgagaatattccctcataccgagttatggagaagattggaatgagaagagaaggcttttttaaaaaatgtattccaaaaggcaatgaatggtgggatgaatattattacgctattttagaggaagagtggaattgtaagagaggtaatgcaggaaattgaaaccataacagctatagaacgtatagtgatagtagggcttatagtgcttaatatgaatgatgtgagaggggtatccaaatgcaaattcatctcaccaaaagcggaaaacaagacaatcatcataaatggttaggaactgtcttgctcagttggggaacattcgtatttgctttgttttttgctactttagtcggttcaatggctagccaagcaggagcttccaagcttttgaagcaaggcatccaagcaggtttagtcacattaataactgtcccgttgctctacattcttcttaaacggatgtctagtagacccttttattctataggactgtctgggtggcggcaagccattccgaaagccataataggagcaatatatgtgattgtactatccgggtctggtttcgctatcgcccatttattaggctggatcaaagttacacaatttcacttctctgtccatttagtgacagcattgctcttaaatatgattatcgctttcttttatgaagcttttccagaggaattaacttttcgggggacggtgtactatgctctaaataagcgttggaactgttttatggccttactcctacagccgatcctgtttgtgcttgcaccaataactgtaagtggcttgcaatatatagttggaattgaatcatctgctatcacattagattacattgttttattgttgggttttggattcatccttcaactcctgcgtattgtaacaggaagcttatggacgtctatcgcttttcatctagcctttcttgaaaattctcggttcttcgtcctgcaggggaaggagcgctttattacctatgaagaaattgttccgggaacaggtgcgctgtttgtgatcttttttatgttgcttattgccggtactctactcttaatacctgttgcgataactcgccgaaatactattcaatggcggaagaatgagaaatgcgaccaagatgtttaatttctaagtagaacagtagttttaaagtgattttaaggaggatctagacaatgttgaagaagcattcatgatgaaagattagtagattttgattctcaaggtggaaaccatattagtgtttatttagttactcactttgagttatctgatcaatcgtattcttttgggtatgaagcataactgttcgtatgcaatggatattctaagcgttaaagaggaatttgatttcgatttcccatttaatatgcttgcaataaaaagctatgtacaagaattaataaaatgttagggattgatataactctgcctgaaatgaaagaaagagattttgacaaactttctcaagattaaataaaactacgattttaaagagaacggagacttgctttcaatatgaatgttaaaaaaactgcagctgttttttcaatcacgattccaattatctcagctatcctaattattaatttttttacgggagttatgtcaattccatggcaaggaatgccggtgttttttccattattgctttctcctataggaatcattttagcgttcgtttcaataaagacaaataaacggtgtgctttatatgggattgtcttaaatgcaattatgtttccatttccttttttctggtttatcggaggggctttgttttttggagtttaaaatccattaggcattacgcttatacattggtattttcgaacttgtcaaaagaaggaataaaaaaatttcagaattgcttggctttactttatgttgaaaggggtcgagtaaggtggataggaaaaaggatgaaatacaaagaaaatatagggaacaaatgagggagaagaaagaacgagaaaaagaagatggcagttcacatacttttgaaattgttgttgtgctagccattatcattttgatgtttttctttaattcagttttcaaggctttttagatattgtacagatgactttcaggatgtttgaaaaaataaccctttgatatatataccacatgaaagtattgaaggacttatgaaaattcaagagccagttgaatcttaataattaatcaccaaataatggggatgtaaaatgaaattgtataatgaatttatcaatatagctaaaatttttaataaagagctagacatcattccattattatatggatctttaggtcttgaaaaggtaactgggttagacttttctccagaagatattgatctccttattcctttaatttttttagaggaaaagtgggaaaaactaaaaaaagtgatggaactgcatggatacaaaatggttgatttacatgagcatgaatttaagaaaactaatacaaaaataggcattgcttacattgaggatttaaaagcatttgcagatgtagactataataatctagaggtttttgaagatggcggagcgaaatatcatttgctaacgattgatgattacctcaaggtttataaaaagtctttattagatggttatagaagaaggaagaagaatcataaagaccaaagtaaaattaacatattgaataaattaatacggaattaatttctgtattctcttttgtttccagtctcaattaaaatttttaagattaaaataagtttgaaaggataaatcatagtgtttaacacagccattaatcctcagacagtcaaaaagccatttctactccggttgaaagcttttcaatttttgcttcttatttatctttcctgtattgatatatgtatgtagggttggacttataacataaactattctggccattcctgttctttcaattcatgaccgggcttgccatcagcataaatctaggctaacagtctccatacatcctgtgatcacctttatcaaactcttaaatgcaacttaccactaaccaattctttatttcgcatagatcatctttgtcatgtgtttacacaagaatctgttttggactaatcgtcgttaactgatacatgacattcgcaaatatttgagacactgaatataacgaaacagtcaaaaatcaatatttaattcattctgtttaaactttctgaaaaagatgttgaaaaagttgaaaggattttataatattaaaacaagttagtttgttcgatcaacaaactaataagatgaactttcattgtccacaagataaggtcttactaaatatggatggaagggggataagagggtcgatttaatggagctaaacaatataagaaacgaaagaatgaggcttttatccttttccaggtatataaggtatgacgagaaaagatgaattttttgcttgctgatcaccatattttttcgcactgttttgaaagcgcttttataaaagtttactgaccgtaaattcgagaaattgttataccgtttcacactgttccatattaaaggatcgaaaaggggagaaatcatgctcagtgaaaatgtaaagaagattagcatggttgaaaaagttggatatgcgtctggagattttgcttgtaatttaatttatgcaacagtgtctacgtatcttttgttcttctatacagatgtttttggtttatcggcagcagcagccggtactatgtttttagtggttagaataatcgacgctctcgctgatccttttatcggaacaatagttgacagaacgaacagcagatttggacgctttagaccgtatcttttattcggagcttttccatttgtcatactggcaatactctgttttacaacaccagacttttcggatatggggaaattaatatatgcctatataacctatgttggcttgtcgcttacatacacaacgataaacgttccatatggcgcgttaacttctgcaatgactagaaataatcaagaagtggttagtataacttctgttcgcatgttatttgcgaatcttgggggacttgtcgttgcattttttgttcccttactggctgcttatttaagcgatacttccggcaacgagtctcttggctggcaactaaccatgggtattttgggaatgataggcgggtgccttttaatcttttgttttaaaagcacaaaagagcgggtcactcttcaaaaatccgaagagaaaattaaatttacggatatatttgagcagtttcgtgttaatcgtccacttgttgtattaagtattttctttattattatttttggagtgaattccatcagtaattcggttggcatttattacgtaacgtataacttagaaagagaggatttggtgaagtggtacggtttgataggaagtttgcccgctttggtcattttaccgtttattccaaggcttcatcaatttttggggaaaaagaaattactaaactatgcattattactgaatattatcggcctcttagctttactgtttgttccgccaagtaatgtttacctcatacttttctgtcgattaatcgctgctgctggaagtctcactgccgggggatatatgtgggcgcttattcctgaaacaatagaatatggagagtacaggactgggaaaagaatgggtgggctcatttacgctataatcggatttttctttaagtttggtatggccttaggaggagttgttccgggtctggttcttgataagtttggatatgtggcaaatcaggcacaaaccccaacggcattaatggggattctaattacaacaaccattattcccgtgttcttgctggttctagctttaattgatattaatttctataacttagatgagaaaaaatataaaaacatggttcgagaattagagaatagagacaaagtttatttggatcatattgatgatttcaaagcttaaaaaagaaaataaactgaggaggagtcccaaatgaagattaccaatccagtacttaaaggattcaatcccgatccaagtatttgtagggcaggaggggattattatatcgctgtatctacatttgagtggtttccgggagtccagatacaccactcaaaagatttagtaaattggcacttagttgcacatccattacagagagtttcacaattagacatgaaaggaaatccaaattcaggtggggtttgggcaccatgtttaagctatagtgatgggaagttttggctgatctatacggatgttaaggtagtagatggcgcatggaaagattgtcacaattatttagttacttgtgaaacgattaatggtgattggagtgagccgattacattaaatagctcgggatttgatgcttctttgttccatgataaggatggaacaaagtatttattaaatatgttatgggatcaccgtattgatcggcactcatttggaggaattgttatacaggaatattctgataaagagcaaaaattaatcggtaaaccaaaagttatatttgaaggaacggatagaaaactgacagaagctccgcacctttatcatatcgggaactattattatttattaactgcagaaggaggaacacggtacgaacatgctgctacaattgcccgttctgcaaatattgaggggccatatgaagttcatcccgataatccaatcttaacgtcatggcatgacccaggaaatccattgcaaaaatgtggtcatgcatccattgttcaaacacatacagatgagtggtatttagctcatttaacgggacgtcctattcatcctgacgatgattcaatttttcagcagagaggatactgtcctttgggcagagaaacagctattcaaaaactttactggaaagatgaatggccctatgtagtaggtggaaaagaaggaagcttggaggtagatgcaccttctatacccgaaacaatatttgaagcaacgtacccggaagttgatgaatttgaggattcaacattaaatataaattttcaaactttaaggattccattcacgaatgaattaggttcattgactcaagcgccaaatcatttacgattattcggtcatgaatcattgacctcgacatttactcaggcatttgtagccagacgctggcaaagtctccattttgaagccgaaactgctgttaagttttatccggaaaattttcaacaagccgctggattggtgaattactacaatacagagaactggacggctcttcaagtcacgcatgatgaagaacttggccgcattcttgaattaacaatatgtgacaacttttctttttcacagccattaaataataaaattgttattcctcgtgaagtaaagtatgtatatttaagagtaaatattgaaaaagacaaatattattatttctattcttttaacaaagaagattggcacaaaattgacatagcactggaatcgaaaaaattatcagatgattacatccgtgggggaggattcttcacaggggcctttgtagggatgcaatgccaagataccagtggtaatcatattccggccgactttagatattttcgttataaagaaaaataatttgcacatgaaaaaggagatttctattttagaactcctttttcatatgagaaggtgcctatgtcactattgcttcagaaatacccctagaataaaaaaactcatctttaaagatgagctgtacattccataaaaattacattgtaaccatgtccagaaaatgatcaatcacaatggaggacattcctaatgccggcgcattctgtcctaaggaagatggcaataattcatagctattgcctaattgggaataaacccttgacgatacttcacttctcattgaatttaaaaccataggatgtgattcaattatgctatttcttaaaattacggcctgtgggttgaaagtattcaaaatattggtaaggcctattcctaaatagaatccaaaattctgtaatgcgtttaaggttccgatatcattcagatgggcgaggtttatgatgtcttgataggacagttttttctctttggtctgaagagattttaataaagccttctctgaagcatacaattcccagcagcctcggtttccgcaactgcatttaggaccattaaagtctattgtcatatgtcccatttctccagaaaagccgcttactcctctatataaatgattgttgataataacaccgatccctatccctgtgctgatacttacgtaaataatgttatcgtgattttttgcagctccaaatactttctctccatatgcgccagcatttgcctcattttcaataaaaacaggcacattgtacttctcttgtatcgaagattttaagtcaatatctctccagttggagttcggagtgaaaacaattttttgatctttatcaatgagtccaggcacgcaaatacctataccaataagcccgtacggagattggggcatatgcgtcataaagtgatgaatcatatcaatcaaaatgtctttcgttatttctggagaattggattccaaatgacggtattgatcaagaacgatcgttccttcaaggtctgttaaaatgccattgatataatccacaccaacatctattcctacggagtatcctgcctttttattaaaaacaagcatgacaggtcttcttccgccacttgattgtccttgacctatttcaaataccagattttctttcattaacgtgtttacctgtgatgaaacagttgatttatttaatccagtcatttcagataattttgctcttgaaataggtgaatttttaaggatttcttttaataataacttttgatttacttttttgacaaaggtttgatcagcgatatccacttcatccactccatttgtttaatctttaaattaagtataaacatagtacatagcgaatcttccctttattatatctaatgtgttcataaaaaactaaaaaaaatattgaaaatactgatgaggttatataagatgaaagtaagttagtttgtttaaacaacaaactaataggtaacttacaatatgaaataaaatgcatttgtatttgaatgatcaggttttgaatttatttttaagggggaaatcacatggctcaatctcattccagttcaaccaactattttggaagcgcaaacaaagtggtttacgaagggaaagattcgactaatcctttagcatttaaatattataatcctcaagaagtaatcggcggaaaaacgatgaaagagcatttgcgattttctattgcctattggcatacatttactgctgatggtacagacgtttttggagcagctacgatgcaaagaccatgggatcactataaaggcatggatctagcgaagatgagagtagaagcagcatttgagatgtttgaaaaactagatgcaccattctttgcttttcatgaccgggatattgcaccagaaggcagtacgctaaaagagacaaaccaaaatttagatatgatcgtgggcatgattaaagattacatgagaaatagcggcgttaagctattatggaataccgcaaacatgtttacgaatccccgtttcgtccatggtgccgcgacttcttgcaatgcagatgtgtttgcgtatgctgcagcacaagtgaaaaaagggttagaaacagcaaaagagcttggcgctgagaactatgtattttggggcggccgtgaaggatatgaaacattgttaaataccgatttaaaatttgagcttgataatttggctagatttatgcatatggcagtggattatgcgaaggaaatcgggtacacagggcagtttttgattgagccaaaaccaaaagagccgaccacccatcaatacgatacagatgcagcaacaaccattgcctttttgaagcaatatggcttagacaatcattttaaattaaatcttgaagccaatcatgccacattagccgggcatacattcgaacatgaattgcgcatgacaagagtacatggtctgcttggctctgttgacgcaaaccagggtcatcctcttttaggctgggatacggatgaatttccgacggatttatattctacgacattagcaatgtacgaaatcctgcaaaatggcggcttaggaagcggcggattaaactttgacgcgaaggtcagaagatcttcttttgagcctgatgatctaatatatgcccatattgcagggatggatgcatttgcaagaggattgaaagttgcccacaaattaatcgaagatcgtgtgtttgaagatgtgattcaacatcgttaccgcagctttactgaagggattggtcttgaaattatagaaggaagagctaatttccacacacttgagcaatatgcgctaaatcataaatcaattaaaaacgaatctggaagacaggagaaattaaaagcgatattgaaccaatacattttagaagtataacaggataagctccagatcctgctatcaataccaagtcactgaattacccgtcatgattcctttcctattgcttgttgttatgacgggtaacttctataattaggatttatttagagtgaatggtttttaaaagggcaaggagtgaaaaaatgaagtatgtcattggaatagatcttggaacgagtgctgttaaaaccattttagttaatcaaaacggcaaggtttgtgcagaaacgtccaaaaggtacccgctcatccaagagagggcgggatatagtgagcaaaatcctgaagactgggtacagcaaacaattgaagcattggctgaattggtttctatatccaatgttcaagccaaggatattgacgggataagctattcgggacaaatgcatggattagtactgcttgaccaagatcttcaggtgttacgtaatgcaattctttggaatgataccagaacaacgcctcaatgtataaggatgaccgagaaatttggcgatcatcttcttgacatcacaaaaaaccgtgttttagaagggtttacattacctaaaatgttatgggtaaaggaacatgaacctgaactttttaaaaaaactgctgtgtttttgcttccgaaagactacgtgcgattccgtatgaccggtgccattcacaccgaatactccgatgcagcaggaactttacttttacatattactcgcaagaagtggagcaatgatatttgcaatcaaattggtatttctgcagatatttgtcctccgcttgttgaatctcatgattgtgtagggtcgctgcttccgcacgttgccgccaagaccgggctattagaaaaaacaaaagtgtacgctgggggagcagataatgcttgcggcgctattggagcaggtatcctttcttccggaaaaacattatgcagtattgggacgtcaggggtcatactttcctacgaagaagaaaaagaaagagactttaaagggaaagtccacttttttaatcatggaaaaaaggattctttttatacgatgggcgtcacgctcgctgcaggatacagcttggactggtttaaaagaacgtttgcaccaaacgaatcgtttgagcaattattgcagggggtggaagctattccgataggagccaatggactgctatacactccttatttggttggtgaaagaacgccgcatgctgattcttctattcggggaagcttgatcggaatggatggagcccataatagaaagcattttttgagggcaataatggaaggtatcacattctctttacatgaatcaattgagctattccgcaaagcgggaaaatcagttcatactgttgtttctattggtgggggagctaaaaatgatacgtggctgcaaatgcaagctgatattttcaatacgagggtaattaagttagaaaatgaacaagggccagctatgggggctgcaatgctggctgcctttggaagcggatggtttgaatcccttgaagaatgtgcagagcagttcattcgtgaggctgctgcattttatccaaaggcacaaaatgttcaaaaatataaaacactatttgatttgtataagaacatttatactcacacaaaggatctcaatcaagctttgaagagctttcgaaaaaactaatgatgttattgtctggagatcaacgaaagaacaattaacgattaatcatcaaaggcctttgatgacatggctgccttcttttgaaaagatggtgagaataaggtatcgcaacctttaaacagtattggagtgtccagcagacaaaacgaacgagcggaaccgtattctgtcagcgaacacttcaagaagtgagaaagcttaggaatgccaatgggtaagatgtatgaaaccgcgctaacgacggtagagggatctcttgatttatgatgaaataggaaggatgtttacacacaaataaccccctcacattgacgtgaaggggtgttttttattgttactatacagcggaaattttacaggctagttgcatgattttagcttgataagcagaatggaactagactctccatcatctctttctaattctttggaaactgcattctgctaggtttgctgctttttttaacaaacagtgtttttctatttcacacagccattaaatcctctgttcgtcacataaccgctcttactccaaattgacagtttatctgattttgcttcttgctcatctagtctgaattggtctatgtattttgtgttaggctcatatacatatgctactctggccaatccctctttcaataatgtctcttgaacagatttgccgtcaacataaacgtatgctaacagtcttccatacttatctctgcgatcgcctttatcaaattccagctgtagcttaccgctgttgaccaattctttatttcgtttcgacgcatcctcaccgtatggttgaacacaagaatttggtttcttcgtctcaggtgtatcaacgagcaagtagcgcactgtgtcttcctttccgttgtaaataaccttaatcgtatctccatctattgctctatctaatgtaacatcgaccaatttcttctgattttttgaatgaggcgtgccggccttttgttctgtctgattatatttattagattgagtatcttgagagacttgctccgtcccattagaatctgaatggtttttggctgcgtgatttgatccgcaagctgccaaagtaatacttaaaacgattgcgatcatactgatcaaaatcttcttcatattgattccctctttatcattttctctttttgcgtttaaacatcatcattataacgatatggacattttttgtgaatggaaaacttcaagggaacttataacactccaaattgccaatagttaactttacaacgagatgatcaaaacatcaccatcacatagcggaaataaataatcctgaaaataatattgactgaaaatgcttttggaattatgataatatgagaaatgacaataatgtaacaaaaacattactacaacataacaactgatagcttaggtttattctattggctaaaaatgtaaacggttacaaatccagaggcgaaaatctaagatagagatgactttagttttgactcaatatccacactgaaagagcttattaagtattcttaataaaggcaggggaaatggatatgaatgaacatcgaaatcgaaggttgaaattaataatgatttcagcaacttttggagggcttctctttggatatgacaccggagttataaatggagctttaccttttatggcaaggccagatcagcttgatttaacaccggttacagaagggcttgttacgagtattcttttattaggtgccgcatttggagcgttgttatgcggaagattggctgatcgatatggccgacgtaaaatgatccttaatctttcctttttatttttcctggcatcactgggaacagcgttagcacctaatgttttcatcatggcggcctttcgttttttactggggctggctgttggaggagcctcggcgatggtgccggcctttttagcagaaatggcaccgcatgaaaagagagggcgtatggtaacccaaaatgaactaatgattgttggcgggcaatttttagcatatgtttttaatgcgatcctcggtgtaacaatggcaaatacgggacatgtttggagatacatgctagtcatttgtgctgttccggctatcatgttatttgccagtatgcttaaggtcccagaaagcccccgatggctaatcaccaaaggcaaaaacagtgaggcgctgcgagttcttaaacaaattcgagaagataaacgtgcagaagctgaatgtagaaaaattcaagaagcggtagaaaaagatacagcactagaaaaggcatcactcaaggacttttctacaccatggctgcgccgtcttttatggattggaattggtgttgccatcgtgaatcaaattacaggtgtgaactcgattatgtattatggcacacaaatccttaaagaatctggttttggtacaaaagcggctttaatcgctaatattggaaatgggctgatatcagttattgcagttatatttgggatttggctggtcggaaaagtgagacggcgtccaatattattgattggtttggcggggacgactacagctctcctattgattgcgattttctcaattgtgcttgatggatctatggcacttccttatgtagtgctttctttgaccgttttatttcttgcctttatgcaagggtgtgtaggacctgtgacttggcttgtcatagcggaaatattccctcaaaggttaagaggacttggttctgggataagtgtttttttcctttggatattaaactttgtgatcggttttgctttcccgatcttgcttagctctgtaggtttgtcttttacattctttatatttgtggctttaggtgtattggcaatcggttttgtgtacaaattcatgccggaaacaaaagggcgtacacttgaagaattagaagagcattttcgttctcgacacgatcataatactcctgaacaatcagttattgagttataaatatgttgaaaatctctcttcttataggagggatttttttagtttcagaaaaaacaaaatccctctggtagagggattttgattcagcattttaagatgttctacacgtataatactggagttgatactttaaaaatctcgccatctcttatataaaaacgagggatgcggcggcttaatgtagacacgacttcatagttaatcgtattgagcatttcagccacttcatcaacggaaatctcggctcctttttgcttaccgtaaatcacgacttcttctccttgtttaccttcaccgttttctcctaaactgaccatgatcatatccattgttactcttcccgccactggcactcgttttccgcgatgaagaacaaatccgcgattggaaagggcacgagaatagccgtcagcatagccaatcgggagtgtagcaattacttcattaggttctgcgatgtatgtagcaccatagctaacggttcggggttctgtccgcatggttttcacataagcgatgcgtgcctttaaacttaacgcaggttcaagcttaacgagatttagttgtttaatataggctgaaggatataaaccatataagccgatacctaaacggatcatatcagcgctaaattccggaaatgcgatagctgcagccgtgttgcacatatgcacggtgggcagctcaatcccctgtttttttaaaaagctgagaaaactgatgaatttttcatgctgcagctttgtgagtgtggtgtccggttcatcagctgtcgaaaaatgtgtgaaaatccctgtccatctgaggaatttacttgcctttaaggctttcactacttctaaaagttcttcctttgtgcgtacacctaatcgtcccatgccggtatccacgttaatatgaatggccagccggttagcactcgcttctttttccaatatctcgtttgcttctttcatccaatcaacctgaaatgctgataatgttatattccaagctgctgacttctttacacaactaagggatgtaaaaccaagcacaaggataggtgctgtaatcccagctttacgtaaaacgattccttcctccacactggcaacagcgagctcactcgccccgtgttccagtgcatggcgtgccacttctatagacccgtggccataaccgttcgcttttacaacagccataattttgctcttatgtggaatatgacggcggatcgctcgcaaattctttttaacggcatcaagattgacttcgatccaaacttctcggcaaagctttatcatcaacgcttccttccttcttatggattgtaaataccacctattgccgcaagaataaatgttaattgttggatgattcgatcttattttattcaactttatttgaaatcattcaacagcaaatccatgtgatacgagaaggtgcctatcaatgttcgaataatagcaagtacgggatacatgaggcttgtaagtggggtgttaatggatgcggcgaccgaggattacaaaaatgattatttgttttgggacatttttttctaagggtagatgataacgagaaatctaatcaggaaatacttaccgttgttatgaacattgaagaaccttttaaatgagaagggctgaggaaattctgtaaaagataatcggttgaaaaggcagtcgattccttgttccataaacctaacatcagagtatataattatactcgtattcacaaaaatcgtttaagtaaggggtatacatgaataggggagttagttttcaaataccgaatgaatatggaaattttctatggagaatactgcagccggtagaaatagctaattataggtggcaaacgagtggggaatcttattttgttgtagaaggagagctcgatgatgaggagctttttcatgactacgcaattgttgagggggcagtttttgagcaacaattaaaaacgaatcagtactataccattttcgttgaactgaaagcatttccatatggaaaaatggttaatcaagtcaatacatatgaagagtttgctgacagtgattgcgaacttgtccttttgatagcagataatagctacgtttcgatttactgtaaaaacaaaaatatcattgaaaaactttacttcaatgctttacagaatgattttgaagacgttcaatttataactgatgaaaatgacacaagaacaagccttactgtatgatactcaataaaaattaaaggagctagtacatgacaatgcaaattaaaatcaagtatctagatgaaacacaaacaagaatcagcaaaattgagcagggagactggattgatcttcgggcagctgaagatgtaacaatcaaaaaagatgaatttaagcttgtcccattaggtgttgcaatggagctgcctgaaggttacgaagcacatgtcgtccctcgttcaagtacatataagaactttggcgttattcaaacaaattcaatgggtgttatcgatgagtcatataagggagacaacgatttctggttctttcctgcttatgcattgcgtgatactgaaattaagaagggtgatcgtatctgccagtttagaatcatgaagaaaatgccggcggttgaattggttgaagtcgagcatttgggaaacgaggatagaggaggactcggttcaacaggtacgaagtaaacaaaataaatccttggctgtcttcatgctgtgtgattgatcaatggaggtttcagccaaggtacaaagaaatacttttatctaaatttttataagtaggggaaggcaactacaaactagtaatgccactaataataagccaagttaaatgacatgtgttcattaataattgaatttacagcagccatgagcacaaaaaaatctgagtatcgtcgataaatatcataaaaaaccccccggtatgtcgccggggaataaatagacgtttaagagatttagtgatgttttttatatgattcgacaaaatcataataatgatcatcgtcatcataatactttttttcgtaatgataatcgtgatcatcgtaatactttttatcatggtcatcatactttttgtcgtaatcataatgttttttatcatgatcataatacttgtcgcaatcataatgcttcttatcattgtcgtaatactttttgtaatatgtttttttccaagtgtaatactcttctttatattttttataataacccaattaaattcctcctttatgttattcgaatttaatttatgaagtttaaatgatatggtatggtcaaatgaaataagaatagtaaaaagaggctgtttaaaacactttctgaaaaacaaaacggatagctgtttattaaaacaagagcgagagaaagcactcaatcactgtaaaataatagtaaagtgtatagagaggattaatatacgtaaaaagggactttctcattgaagaatatttgaacgttatggttaagattcagagctctatgatgtgatttttaacactgcttttgaaggatttaaagttagacatcaaaaacaaacagcaaaaccggttagaaacagatcatataaggaatgaaccgctgccaaatatcataaaaaagttgttaatgatcaaatgaatgaaattagagagaatttattttaaagaaagcccaattgcacatggacaaatgacaattgatattgaggtaaaatacaatgcattaaatcagaaaaagctattggaggatttaatgtgtttagacaatttccaatttggtatacacaaacacctgactatttgaatttttatgtaccgcaatatcaaaccatttcgtataatcctcaacaatgttatcaacggtgtatgtaccaaactggcggtaactatgagctatgtgacagactatgttatggagaaatacaggtgtaaaagaggggggattaactcctctttaaacacacagtgagtggaataagatcctcactttatctgcaagtgcttagtatttgcgataatattgcattcgtaataaattatgcttagcaactgaaaatgaaagaaggatatgaatagtcatgacgcaattcgataaacaatacaattcaattataaaggatattatcaataatggaatctcagacgaagagtttgatgtaagaaccaagtgggactcagatggaacaccggcacatactctaagtgtaatcagtaagcaaatgagattcgacaactcagaggttccgattttaacgacaaaaaagcttgcctggaaaacagccattaaagagttgctctggatttggcagctgaaatctaatgatattaatgatttaaacaagatgagcgtacatatttgggatcaatggaaacaagaagacggcaccatcggacatgcatatggatttcagttggggaagaaaaacagaagtctaaatggagaaaaagtggatcaggtagactatcttcttcatcaattgaagaacaatccatcttcacgcagacacattacaatgctgtggaatcctgatgaattagacgcaatggccttaacgccatgtgtatacgagacacaatggtacgttaaacatgggaaactccaccttgaggtaagagcacggagcaatgatatggcattgggaaatccattcaatgtattccagtataatgtgttgcagcgcatgattgctcaagtgactggttatgagcttggtgaatatatctttaacattggggattgccatgtgtacacacgtcatatagacaatttgaaaatccaaatggaaagagaacagtttgaagcacctgaactatggatcaatcctgaagtgaaagatttttatgactttaccatcgatgatttcaagttaatcaactataaacatggggacaagcttttatttgaggtagcggtttaatgctgcctttttattgttatttttcagaatataagctggcattaggctaaaaatgaagaaatttcttcttcatatttctataaacaaatagtaaacaaaattggagcccaacgcgaaacaaaaggattgttagaagcgttgggttctcttagtacaagtgaacaacgattgcgtggtctgaaaaattaaacgaacgatatgaaaaggccattggttttataaggtgttaattcctcctattaatatcataaggctcaagaaaattgtaatgaaaagaaaagcccatactatagctgtaaaaggattgttgagtcccatcctttctttccaatttatattagtggatcgattggttttgtattttattaactggatacataagatcacattaaaaaaaactgaaataacaagagctataactaaataaaggttcattttcatcaacctttctaggttttttaaacacttgaatagcttaattgtaaacctaatattaacatatacatatttcaccttaaaagaccagcatcgtgcaatgaatacaattactttgtgcagttctaggttatttgtttttattatgaaactttttggtccctggctaaaattcaacttaaaaatgaaaagattgaaattatccatgattgtgtttctgcgatggattgccttaaaatttggtagggatgaacaagcactatattaaataatactataccaatgaatttctattagaaaaattcataatattttaaaataaccatttaaatatatttctagaaattgtatacttatatggtactaaatgaatacatagaaaggactgttgtcgatgaaaaaagttttttgtaagttagccattagttctatagctctatttaccctatctcttcctaatggcaatgtattagctgctgaaaaaggggaagaaaaacctgtctcaattaaaggcgttgagtcacaagtgcatactgtatttgcaaacgagacaactggggtaaaaagcaacttaggaggaggagagtttactgcgcaatttgtgaatgattttcgtaatgttaagatgaatgtaaaaacatataaaagctggtctagctttaaaagagtttctgataatatagcaacggggagtaaaggaggatctattactgcaaacaaaacagttacttttacaacaactgtcagcggatctataagtggtttaggaatatccactgcaggctctgtagctagctctaaaggatacactctaaatgttggagcgaataaaagagtctatatggcatatagagttaggtataatgtagaagaagggtacaattgtcgtaaggatatagttactggtaaatgtgtatcaaagaaaaaatacgtagttaaaaaacctatgtatggagaatatgcactgaaaaactattaattttatataaaaaagattagctataaaagctaatcttttttattaagaagaaaatatcctaattttgaaacgagatacaaagtgaaagcaatcattaatgttctcgatataacaattccatgaatagccaaatcatatccagcaggtatcaaagcttttgtattaaacataaaatacattgataccagaagagcaataataactaaaataattccaaaaagacctatttttccgtatttcatacaaattccaccctatattaaaatatgataaataaccaaaggagctgaagatttcgataattcactttacaatcatcaagcaatgaccaacatcgaacctttgttggtgtaattgtcaacttaagcttcaagttagttatttttgtaattaaaaaataattgaaagccccataaataaggggcttttaatttatgtagttctatagtaattgaattaatcataccaaagttatttcaaaatttcaacttttgcttatgatgtttttatcatcgaaacaaaaatgtcttaattctaacgctgttcaaataaagtttcatataaaaaggaagtactactgttcgtaaatctatatagggagtggattccgacacggttttttatggagatggaaaattaattataaaaccgccagacaatgctggcggctttttgctgcttcgtttatttattaacagagatcgtaacgttatttcctgcaactgaaacctttgcgaaatcctgtgtatctaccacaggagtgacggctttattgtcgattgtgatgttgttaaaagatgtcgaaaaggttgctttgatcgcatcacgctggctttcatacgaaacagccgcggtagcaagggttttccattttgaaatcgtgccgatgttggttccttgaatttctgtgataatccgtccggtgtagccgtcattgttcgttccccaaagggtcatgcgcgtattgccgcttaaatttttatagattgtcatttggactgtgcttccagggcggaagcctttattgtatgtgaatttgtcttttccttcgatgtacgtttcttcatttttggacccaaccttcatgaggggcttccagacgttgtattgtttgctgtactgaagcccgatatcggcttcagttccgcttgttgccctaaagccagaataaatatagggagtagagaccgagtcgttgtttttgacagtttcaggaagcgtgattttagctgtaaaaatggcgcccgtactgttcaggtagacacggccgccgattccgttaggcagctgggatgctgcttttgcgacttgagcgtctgccgcgggtaaacctggtatacctgatgaaagggttccgaaaagaactgcagttcctactgcacctgcaatcaatacttttttcatcaaaattccccctttagatagtggtttcgccatttattatacctaattttggaactggattgatgtatataaatcgacaaaatatttcattttgagtgaagtaagggacgaaacgcttcgccaatctgaaagctatatacctttatcagaggaaagaatgagatcacaatcgttttaaccgatttgaaattttcctcaaaataaaagtacaaatgcttaaagaaacgattattaaaagaatgcccgctatcgtttcccagcctgtaaaaaagaggtgacgtttcatcaatgtctgtccttgtaaaatgataaaagcacagataccgactaagaaaagaaaacaaatacttaggattgctaacgctttacgtgagtatgttttcatttcatctttaaaatacagcaatacgaaaacaaagcagataacattggctattgtgcttatcacctcaaagcttttcatgacaactgatataaatagacaaagtaaaatgagataaaatacgatgtttctatacaaaaaacctctccttttatgtatgatcctcaaagagtttataaaagtttctttgtaactgcaataaactgaatgcgctcaattatgaactaactaaactatgtactaaatattcactattcattttcagattcagtcaccaaggttttcatagaaagggaagcttcagaaatatacatatagtgcacaaacaaaaaagacccggcaatagccgggggaaagtaaaaacgaggagatgttaatggcgtttagtagtgttttttatgctttttatactctacaacataatcatagtcttttttatcgtgatcataatattttttatcatagtcatcatattttttgtcgtaatcacagtcataatcttttttatcatgatggtcataatcttttttatcatattcgtaatacttcttataatacgtttttttgaccgtataatactcttctttgtattttttgtaataacccatatatactcctcctttatttttactacgctttattatacggcgagtagattttgcggcttggacagttaaaatcatagaaggaaaaaagggctgtccaaatgatagaaaaagacagatgacacaaaaacaaatcaaaataaagagccgatttttcatcggcccaaacgatttatcctacatttgtttgtcttcttttttttctgagtcattttttctgatatcctgagtcagtccgcttgttgcttgtttaaattctgataaggcttttcctgctgcacggccaagcgccggcagtttatcaggcccaaatactaaaaaacccacaaacaaaataacgagtatttttgtgaagcttaattccatatccttttccccctgattgaagtacaaccttttaaacaaattataagagatagcagtacaaatgggaatgcatttattttgaacattttaaaaccagacaaagacggattcataaaacggctgctgctgaatataatgtccaatgccacctgcctaagaagcagggaggaaggctggatcaattatgtagctctgccggaaatgatacaaacgtatctgcggctatcattgaaatagaggagtggtgtagctgatgagattcactaaggtagttggatttttgtctgttttagggttggctgcggtttttccattaacggcacaagcagaaaaagccggaactgcgggggctggagaatgggataagttggggacttacacatatacttactcaagtccgacggtatactcgaccggaggagattttagagtgtgcctttcaggaagcactcctttttctgtttcactgcacttatatgaggatgatcccggtgacaatcctgatgattatgtaggggcaaactatttttcacccggagaatgccacacctttggcagtattggaaaatttgtagatgggagcaataacaaggccgagttctttgttaccgattactctggtaaatctaaaactgttacgttttatgattgatggactcaaattgtgaagtataactcttgggaaaaataaaaaagagagagatacctctctcttttttattcttcgacagctttacgaagccgttcatttacaatgccagtccagccgccatccatcttaccgcgaacgacggagcttttctcgtttgctttgccgatcacttcattcggctctttccagccgctgtgaataagggtaaaccctgtcttttcccccaagtcttctaattgaaaggtaacgacccatccttctgtatcccattcaaaagaaagttcagttggagcttgaacagccaaaactttacaaggggacggcccaaacggcgattgtaagtgaaattcttgtccttctttgagctgaaagtcattgggcataaaccacttggcaatgccttctgaagtagagactgtctcccagactttctgaatgggagcctccagggtaatgctttttgtaatatccggtaatgcattttcgttgttttgagccatttcgtttacctcttgacatatgatgtttttttcaattcaatcatataataactaatatgatcatgtccatagcgtgcattatttatgctagagctgctgttcaacagcgtgtcagttgccagtctgatctgtgaatgggagaattctgcatgttcgagaaagagagagatgtgtatgttgtcatttcgttcatgcttgtttgctcagccgcaacagttatgtttgaactggaattcctgttcagccaatttattttgcgatttttgttttaatagtaaatgagccattttctaaaacaggaggttttttatgcttggaaaaatcaaagcagccattgataacagtccagggaagccggccagaattatagttagtgaaaaagcgtttcagcaattagaggaagaaatgcgctttgtttacgtttccaaaccgaaaacgataatggggattcctgtggaagtttcagaacaggcagaaagcttcaagctggaattttagtttatcccagactgctaaaaggctcattttatgataattatgcaaaatggtcaggttggtttctttaaaagcatgatgaaatgttcatcatgctttttttatcgagaaaaaagacgaacataaaaaataggtatacgggaaaaataatcctattagagagaggggaactgacagatggataacatgatatcaacacttactgactggaatgtgtggtttcaagtgttaattgtatttctcgttccatatgtaatctataaagtgtttacttggattcatgtataagaaggtgcaatgatgaggtggcggagcaatcagtacaaaacacagaagcagcatatatcaggtcattcaacagctgaaaaggatcaggatgtgttaaccggtaacatcggatacgatttagaacatgtaaaaagaaaaataggacataacggggacgttcacttccgtgagcttgaaatcactcatttacatgtaaaagcggtattgatctttgttgaaggaatgtctgatcaggaattgattaataaaggtctatcagtgttagttatgaatcaacctaatcaggtaagcgatgaaattcaatccggcaaaggtactttaacttcgaaacagataaaaaatcaaatcatatcaatcggtgatgtcatagaatcagagaaaatcagtgatatcgtgttgaatgtgttcatgggttcgacagcgcttctcatcgatggaataccgcaggcctttcttctgggaactgtaaaaaaacaaaatcgaagtatcgaggagccgctttcagaagcgcttgtcagaggaccgcgcacaggctttacagaagagttgagtacgaatacagctcttttgagacagcaaggaaaaaatgatcaattaacattgcagagatttgaagtaggaacacgattaaaaaaggatttaatcatcgcttatatgaatgacattgcagatccaaaagtagtcgaggaagtaagaaaaagagtgagagggattgagatcgatcatttgccggagtcaggttacgttgaacagttaattgaggataattatttgagcccgttcccgcaagtacagagtacagaacgtcctgatcgcgtcataagcggattaatggaaggaagagtagccattctgcttgacggcactccgtttgctttgattgttccagtcactttcagcatgatgcttcaatcgcctgaagattattatgaacggtggttcccgagctcgctcatcagattgctgaggttcatcgcagcaatgataacgttattcgcacccgctttatatatatcatttatttcttttcatcctgggttaattccgaccaagctggcgatttcaatttccgggacgcgccaaggtgttccgttcccatctctgattgaagccttatttatggaagtcgcgattgaaattttaagagaggcggggcttcgtttgccaaaaccgattggacccgcaataggcatagtgggcggattaatcatcggggaagcagctgtgcaggcggggattgtcagtccaatcatggtcattgttgttgcgctcacagcaatttcttcatttgccatcccgcattatagcacaggtatagcacttcggatgcttcggtttggcgcgatgttttgtgcggcggtgtttggattgtttggagtcattatgtattatctgctgctaagcagccatgtcgtaaagctaaagagctttggtgtgccatacgcaagtccggcagtgccctatcacttaaaagattggaaagactttgttatcagaatgcctcttttagtcatgaagcgccggcctaaaatgatgaatacagataatacaaaacgggtgaagtgatgaactcgacaggatggtgataaagtctcatgttcagcccaaccagtaaaatcacaaccgctcaggcaacgattatcatcattaattatatgcttgctgccggagttcttacgctccctcggacagtaacagaacaaacacaatctcctgatggatggatttcagttttattaggcggggtcctagcggtaatagccgggatgatgatagttaaattaagccagcagtatcctaaggagaccttttatgaatactcccgacatattgtaggaaaatggctcgggcatctgatcagtattgtttttattacttattttctggcactcggtgcatctgaagtcagagtcatgtccgaaatcgtggatttttttctcctcgaagggacaccgtcttgggccatcattatgacagttctttggattgggctttattcaattacacaaggcctagatccgattgcacggctttttgaaatgatttttccgattacggtcatcatctttttaacgatagccctcatgagtttaggcatatttgagatcaacaatttgcgccctgtattaggtgatggaatcatgccggttcttagaggtgtaaagacaacgaacctttcatttacatgttcagaaattatgttcattttagtagcatttatgaaaaagccgaaaaatgcggtgaaagcagttgtgatcgggacaagcgttgtgaccagtttttatatgattacgatgattatggtcatcggtgcactatcagttgagggagttgtgacgagaacatggccggggcttgacctgatgagaagttttgaaatacctggtttaatatttgaacggtttgaatcatttctgcttgtgatttggattatgcagctttttgccacgtttattatcactttttatgcagcttccctgggagtctcacaagtttttaaaaagaaacccctttcatgtatgtttgggctgcttcctgttatatatatcctctcttgcatgccgaaaaatgaaaatgacgtctttatattgggcgatacggtcagtcatatcgctttgtatatatttggcgctttgccgattttgctgttagtcatttcgaaatggaggaaaagaggtgaaaagtaaactaaaacgtcaattgcctgctatggtcatagtatgtctgctgatgatttgcgtaacaggatgctggagcagtcgggaaatagaagatctcggtctcacattcgctatcgcaattgataaaggaaaagaaacgaacactgaaaaagagttaaaagaagagggcgggagctatccgaaaaaagacaacattacgctgacctatcaatttgttaatgaaaaagcggcaggcgcgggcacaagcgggggaggcggtagcggacaaggagcgcaaaaagcgtacattaatataagtgaaacaggggattcattacagcagatcggaagtgaggttgcattaagacgggaccgagaagtgtttagcccgcatttaaaagttgttgtcatgagtgaagatgtgctgcacacatttcctatcgacgaaatgctggatcaattttttcgtgataatgaaatcaggctgagttgtcttgttttatctgctaaaggggaagcaagagacgctctccagctgaaagagaacggagaaatcccggcttttcggctgattggattaggtgaaaatgaacataaagtttccagaatacttccccctataacactcgcgaaactaattggaaaactgcattctggcagcagttttttactgcaaaatgtggttgcggcaaatggagcggtcaagtattccggagcagctgtaatcaacggaaaatcgaaaaaaatgatcggcactttaaatgaatatgaaactgaggggattacatggattagaggagaagggaaaggcggagttgtcaaaagtcatgataaaaagagccaacagacattagcgtacgatatcaataaaatcaaaagcaaaattcagccaatcgtaaaagggaaagatatttcattccatgtcgatattgaatcagaaggcgatttggttgaaaactggaacacaaaagaggcgttggacacccagtttatagatcgtctcgaaacgactattgaaaacgaggtaaagaaaatagttggtcaggtattaaaaaaaattcagcatgattataaagcagatgttgcgggttttgatgaatcttttagacttacatatcctcacttatggaaaagggtgaaaaataactgggatgacaccttcagtaaagccgacatcacatacagtgtgaacgtcacaattactcatttcggcacggttaaaactcagtaatgaatcccaaggaagagaaggaaacctctcttctcttttttatgcattttttaggatgaagatactttttttggagagatatacacttttcaaatcgaccaatatgctaatataggaattgcttgaaatagaagggacaaggggctgtgaggcagaaaccgatttatgtagaaatcgaaatgaaatctgatctggatacactctgggaatatacacaaaacccatcactgcataaggaatgggatctccggttttcaaatattacgtatttgaatagtcagccatgcgaaaaacagaagtttctttacgaaacaagggtaggctttggattaaaggtgtcaggtacaggagaaaccgtcggtgttttcaacaaatgttcatctgaaaggtcttcttcactggcttttggctctgatcatccattatctctgattcggcatggaagcggctactggaagtatatacagagagaaaatgggaaaatgacgtttttaacacagtatcaatacaaaacagcctacggactgccgggaagatggattgatcgtttattatttcggccgctgcttggctgggcgactgcctggagctttgatgcattaaggctttgggtagagcaaaataaacatccgaagcgcttcattcgatctgctatcatctatgtgttcatgtgtctgtttttcagcctgttttggttctatcaaggctttgcaggtgttaagacaagcatattggcaggaacagcggagataggcttagctattttgtggctgcttcctttaaaaagaaaatggatcattcatggtgtccaggcttgtatttttgctgggtttgcttgtctaggttccgaaatattcatgtgggttctgttgagtgtgttttccgctgcaagcggcgctcttagcctgcagctccccagtgccaggcgcacaaaacgaaagagaaagaagtgacattgtgagttcgatttatgaaaaatcaattattaactatcatttgctgcatcccaagctgcagaaacggtaccaattagacgggtctcatacattcagcgggacgggaacgatgtcagaaataagcggaggctcttttctggttagaatgctgttaaagctgggtgtttttttcagatgcttcttttcagaaagaggcaaagacattccatttacaatacaaaatagaacttgtcttttgaaatcgcaacatacaggaatagaatggaatcgtacatttttctttaaaggcaaaaaacgtttctttgatgcgttaatgatatatgacgagaaagaaaatagaatacttgatttcttcggcaaacctcatctgctgctgtctgttttgacgttcgaggcatctcatgacggctctcttacgatcacatcgggaaagcaatggctattaatatgcggaaaaagaatcccgctgccgaaatggctgaccggtacatccgtagtttgcgaaacgtttgatgaaaaaaagaattgtttcaccattgaagtgcatgtgcaaaatacaattcttggcactcttttcttttataaaggaacgtttcaggaggaagagagagaatcatgaaacgaaatggcatagtcagtgcgctttgttttattggatttcttgcagcagaagcaccggatatttcagtggcagaggcactcgttttgttatccattctatttttcgtgccgggaatttttccttttgtttttcgtcaatctccggttcgtgctgctcagtttatggaatatgggctaatccagtggtatccggcagccgcattctttgcggtgctggctctagtgacggaggttgggggtttcgcacttatctggtggatgtacacagtttttattgcattgtatgcgatcctccgcctttgggaaacaaagatacatagaatcgaagagacatcagttttgttcggccttatttatttggcgggaggaggattttggttttttgcttatgctgcccatttgcagatcatgcaatttggccctctcatcattttgctgactgctgtccactttcactattctgcttttctgatcccgatcttcaacggtttactcggcagaaccattagaaaacatcggatgttgtacagttggataacatgggtgatttttctttcgccccttcttatcgcactgggcatcacatattcaaaaacacttgatgtcattgcggttagcatttatatggcggcgatttatcttcatgcatttttggtgttcacggcagcttttcgcaccaagacggggacatttcttattcggctttcttccgctgttttaatgataacgattgctttctcgatgatttattcatttggtgtatttcggcaagaagttacattgaccatcaatcagatgatttggattcacggttttgtcaatgcgtttggtgttatcttgcccgctctcatagggtggagaatagaggatgcgaaaccttttgatgcagacagtgtaaagacattcagccgtatctacggaaaaagaaagattggagaagaatttttagctaacattcaagctgaaaataacgctcggtacagcggacttgtggatgatatgggcagcctgcgttcaaaagatttttcaccagaaaaactggagccgctcattctttcgttttatgaacaaaccatcgaatacaatattaaagcaaaagtaacatggagcacgtggtttcggccgcttgcaattatttacgaatggttcagcagaagaatcggccaaatacatctttcgacgaaccctgactggtataggatgtacagcaagataagaggtgttcattctaaaaaagacggaagggaaagagtacgtgcctggattagaacaaatgaaaaaaacgaaaccatttttaccgctctttattcagtgtatcgttcaaatggagaggggtatatgaatatttctttaccgcttccattcagcagcatgacaggtattttaaaaccatatcatcaccaggagaagctggttttaacaagcaggcggagaaaaagcagagcgggggatgagggaatttatctgcaaacaagagcgggaacttgtccgcttcctttatctgaaacctttctgatagaagctgcacatgacaacaaattaaccgctgttcatcatatgtggctgtttgaaataaaatttctaactgttcattacagcattacacatattaaccagcctattgaaagaacctaacacaaagaagaagcttcgtctgccagttgctgcatttcaaaattctgcaccgcatcaagacaggaaaggaagggtttatggtgttttatatcagtttatttctgattctttggctggctgcggggtttgcagtgggaatgaaacaagtgtatgtcgatcagctgtttgataaaactgtgatcgaaaggctggaaaaagaagcgaatgatcatggacaagctgaccggatgatcaaacagcgcgccctttatattgcagcagtgacattaagcgggtttatttctgtttattatgaaatgaaaacaatcccgcaaaggcgaaacataagaaaaattgaaaaaaacatcatgaaattaaatcaagtaaaaaaacgaagaatgaagagaaaataaaaatgcacaggccaaagggcaggtgcatttttgttttgtatggaaatgggggaggtggtgccagcttacttttcataaattcaaaaatgagaagaacagcgcccgggctaatggtatataatattgtgaatttaacaaaaatttaacaaggaggacgagagaattcgtgcttaagcctcaaagagacctacatcctgttgatttggacttagaggcggagtagatgaaaccggccaaagtatccctgctccgccgtttgctccattccttgaagcatgttgattgtaacatagccaaacgttttccatcaactattaaaattgtaaaattattgtttatttttatggtatttactccgatttcttcaatttctgctgaagatgtataccagaattttgaggaattaaaaaacaatgaagatccttctgattacgacgttgttacgaaagaaaacggaagccctgttcttgttttagccattcacggaggaggtattgaaggagggacaagtgaagtagcgagagagctcagcaaagagtactcgatgtatttatttgaaggcttaaaatcggcaggaaactcagtcctgcacattacgagcacgcactttgatgaacctcgggcccttaaaatgacgggaaatcatgaatatgtcatttcattacacgggtacgcagaagaagatcagcagatcgaagtcggcggtacagatcgcgtaagagcggcagatttagttgagaaattgcagcatgccggttttcctgctgtattgctcaatacggaccatccacatgcgggcgttagtccgaataacattgcaaataaatcaaaaacaggtttaagtatccagatagaaatgagcacaggctttcgaaagtctttgttcggcatcttttctttaaaaagcagagctgttactcaaaatgagaggttttataagtttacagaagtgatgttccgttttctcaaatatagctactgaaaaataggaggcgataagacagcctcctattctttatgcttctcattcgtttcgggaaacagctcgtccgcggcttccgtttgatactgcaacgtgttatctctcgctgacagttcatttcggaaattttcatcaagtacatttttcaataaataccgatgaaaaaagaattcaaaaacagtaagacaggcagcggaaaggagagctgctccaaatggtgagaaatcgtttcttgtttgggttaaaacaaatacccaaagaataacgaatgaaaggccaaagtcagccaatgaagctgtaatattgtttgttctgggtaagacgagcatgtcaccagaaagataggaaacaaaacctaagaaaagtgcaataaacatcacacttaagaaggatgcgtgatagactctgtccaaaatcacatataaaagggcgagagtgaaagcaatctttgaagcaagcgcaatgatatgtttcatttgaccacctaaattgttattttttgaagaaaattcttgggcgtaaacaaatgataaataatgcaattcaaaaccattcataatggtcatgttactattttaaacagtccgtttttgtttacactggtattttttttcagcagtatgaaactttcttatgaaaaaagacgtatatgtggatgatcagctttcaaggggggaatgatttgtggagataaaaggaatcaatcacttgctattttcagtttcgcatttggatacatcgattgatttttatcaaaaagtgtttgatgcaaagcttttggtaaagggaagaacaactgcatattttgacatgaacggcatctggctagcgcttaatgaagaaccagacatcccgagaaatgacattaagctttcttatacccatattgcttttacaattgaagatcatgaatttgaggaggtatcagctaaattaaaaagacttcatgtcaatattctgcctggcagagaacgagatgaacgcgatcgaaaatcaatttattttaccgaccctgacggccacaaatttgaattccataccggaacccttcaagacaggcttcgatattacaaacaagaaaaaacgcatatgcacttttatgatgaaacggccttttgacatcacacaccatatttcatataaggttaaatttaaagaagggtgttggtggagactttatgtttggagaaggtttctacccgattagttcaacgatgccatatcttttgaactgcacaagtgattccgtgaaggagaaattgaaatacatattacattttatatgaagaaagcgagctgttttaacagaaagatgaactaattagactgtgtactaaattttcagtatatttcaattacctcgccccttaataaatatgaaaccgtatccttccacgacctaaaaaatgaaacgtttttaagaagatggcgtctaatattttaaatgttcatattttgataaaagtttcctaaaggaaagaaaatttcttgacttcaacaatcttttggtggataattgtggtgtaaacatgatgttctttttcctcctattcaggctcgcacccaaaagtcagggcgagcctgctttttttgaacaacaaaccccctctccgtaaaggaagagggggttattttatgcatctgatagatcaatagattaatggacggttctgaacacgccaatcactttccctagaatgctgacattctgcaaaatgataggttccatcgttgggttctcaggctgcaagcgaatgtgggtatcctctttatagaatcgttttacagttgcttcatcatcttctgtcatcgcaactacaatttccccattgttcgctgtgttttgctgtttaacgatgacatagtccttatcgagaataccagcatctatcatactgtctcccataatctccagcataaatacatgctcgtctggaggaaccatgcggtctgggagcggaaaatattcttcaatattttctactgctgtaataggagatcccgccgtgactttcccgatgaccggcacattaacgacctggctttgcggaatgtctacttcttcatcaagaatttctattgctcttggttttgtcggatcccgtctgatcagcccttttgtttccaagcgggccaaatggccgtggacagtagagctggacgcaagcccgacagcctctccgatctctctcacggaaggcggatatccttttgatttaacctctgctttaataaaacggaggatatcaagttgcctttttgatagcttcgtcatttttcgcacctcaaaacgtcgattttaagaagattatagcatgattttccttacagtacaaacataggttcgaaaaaacaattgacagaaacgtttgttcgtatatactgaaattataaaaatgcgaacaaacattcctgttggaggttatgatcatgagtaaagaatctattatttttgtcggtctgttcacagtgattttgagcgcggttatccttatgctgtcatatacaagcagcggccaagagcttaatcagtatgttaaaatagaagtccagcaaggcgacacactctggtcaattgctgatcaggtagcagatacaaaaaagataaacaaaaatgattttattgaatgggtagctgataaaaatcaacttcaaacctctgatatccagccgggtgatgagttagtgatcccattgaaaaagaagcatcaggatgcatatgaattagcaactgtaaaatagagaggaaagagagataaaatgaaagcactcatttatgcccgtgtaagcacaaataaagaacagcaggaaacgtcattaaagcggcaggaggaggagcttacggccattgcagcggagaacggtatggaagtggtcaaagtgattttagaaaaagccagcggatatgaaatggatcgggatggtgtatttgagctgcttgatgagattaagaacgctggaattgatgtcattttggttcaggatgagacaaggctcggacggggaaacgcaaaaatcgcactgcttcattgtatttatagagaaggtgtgaaagtctatacaacggctcatagaggtgaactggagttatcggaggctgactcaatggtcttggaaatcgtcagcattgtggaagagtatcagcgaaagattcacaacatgaaaatcagacggggaatgaaacgtgcagtaaaaaacggttttaaaccgcaaaaaaacttaaaaaaccaacatgggaacagtggaaaagaaaaaatagaggtgccaatctctgagatcgtccgcctaagagcgaataaactgacgtttgctgaaatcgcggctaccctaagagggtttggctatgatgtctctaaagcaactgttcaccggcgttttcaggaatacatagagaatgaagagacagcagagtgaatcagttgtaaaactttttttgatctagtactatatagacaaaatgcaataaaggagtttaacatgatttcaaacgcgaaaattgccagaattaatgaacttgctgccaaagctaaagctggcgttattacagaagaagaaaaagccgaacagcaaaagctccgtcaagagtacttgaaaggttttcgttcttctatgaagaacacgttaaaaagtgtgaaaatcattgacccagaaggcaatgatgttacaccagaaaagctaaaaagagaacaaagaaataacaaacttcactaatataagaggaatacggcaatatcgtattcctcttttgcatatactataatcaaaactcttatgtgacaaaattcaacaagtttctctcaaatttaagctgaaacagttgagaaaaagtcgtcagacatttatgatgtaagggtacaacacataaggaaggggatttttatggatacaattgaaaagaaatcagttgctaccattcgcacactgtcaatagacgctattgaaaaagcaaattctggtcacccagggatgccgatgggagccgctccaatggcatacacgctgtggacaaaatttatgaacgtaagtccggcaaaccctggctggtttaaccgtgaccgttttgttttatctgctggacacgggtcagcactattatacagcatgcttcatttaagcgggtttgatcttagtattgaagatcttaagggattccgccagtggggcagcaaaacaccaggacatccggaattcggacatactgccggtgttgatgctacaacaggtccgcttggccaaggaattgccatggcagtcggtatggcaattgctgaacgccatttagcggaaacatacaaccgcgattcatttaacgtagtcgatcattatacatacagtatttgcggtgatggtgatttaatggaaggtatttcttctgaagccgcttcactcgcaggccatcttcagcttggccgtctgatcgtactatacgattctaatgacatctctcttgatggagacctcgaccgttcattctctgaaaacgtgaaacagcgttttgaagcaatgaattgggaagttctttatgttgaggatggaaacaatattgaagaattaacagcggctatcgaaaaagcacgccaaaatgaaaagaaacctacattaattgaagtgaaaactacaatcggattcggttcacctaaccgtgccggtacatccggtgttcacggtgcgccgcttggtaaagaggaaagcaaattaacaaaagaagcttacgcatggacatatgaagaagacttctacgttccgtcagaagtttatgagcatttcgctgcagctgttaaagaatcaggtgagaaaaaagaacaagaatggaatgctcaattcgctaaatataaagaagtttatcctgaacttgctgaacagcttgaactggcaatcaaaggagagcttccgaaggactgggatcaagaggttcctgtgtatgaaaaaggaagcagcctggcatcccgtgcatcttccggtgaagttctcaacggacttgcgaaaaaaattcctttctttgtcggaggttctgctgacctagcgggatcgaacaaaacgactattaaaaatgccggtgattttacagcggttgattactcaggcaaaaacttctggtttggtgtacgtgaatttgcgatgggtgcagccttaaacggtatggcgcttcatggcggtcttcgtgtattcggcggaactttctttgtcttctctgattacctgcgtcctgcgattcgccttgcagcgttaatgggccttcctgtgacatatgtcttcacacatgacagtattgcggttggtgaagacggtccgacgcacgagcctgttgaacagcttgcttcactccgtgcgatgcctaacctttctttgatccgtccagcagacggcaatgagacagcagcagcatggaagcttgcagtgcaaagcactgaccacccaacagcgctagtgcttacacgtcaaaaccttcctaccatcgatcaaacagctgaagaagcattggcaggagtagaaaaaggtgcatatgtcgtttctaaatctaaaaacgaaacacctgacgctcttctcattgcctccggatccgaggtaggtcttgcaattgaagcgcaggctgaattggcaaaagaaaatatcgatgtttctgttgtcagcatgccttcaatggaccgttttgagaaacaatctgatgaatacaaaaacgaagtccttcctgcagatgtgaaaaaacgtcttgcaattgaaatgggctcatcatttggatggggcaaatacacagggcttgaaggtgacgttctcggcatagaccgattcggtgcatctgctccaggtgaaaccatcattaacgaatacggcttctcagttccgaacgtagtgaatcgagttaaggcattaatcaataagtaagcttttgaaagaggatgagtcaaatcatcctctttttcttgtttatccgacaaaaatagtattggctgtttaacagtaatagacaattctttcttttcttcttttgtataatagagagcaaatgaaatgctgctggaaaaggggatgaaaagatggaacgtcactactatacgtacctgatcaaagaggaatttgccaatcactatttcggccgggaatcggttatgtttgagctgtttcaagactatcattggacaagccttgaaaagcagcagtatgaaatgacagagaaacagattcaatatattacacaaccaatcccgattttacatatgcatcagcggttaaaaatgaatttaaacaagacggattacaggcagctggattatatttatagaatagctttgccgaaagcaaaaggccacgcgacgtttatgatgaaggagcacatgatagaaattgtggcttcgggagattacgaggcagaaacgatattctttgaagtgttaagaaaagtaagcccttgctttttagcaatggatttcaattcgaagcgttacggatggctaaatccggtgaaagaaagaaattttgtctaaaaccgaagaaaaagagatgtaaatgttgtataatagcttttggtttagtacactttaaactagacaacatgaaggaggaaataaaatgactttatgggttggcatcctagtgggcgttgttgcattgctcataggtgttgcactcgggttttttattgctcgtaaatatatgatgagctacctgaaaaagaatccgcctattaatgaacaaatgttacgcatgatgatgatgcaaatgggaatgaaaccttctcaaaagaaaatcaatcaaatgatgaaagccatgaataatcaaacgaaataatacgtaaagattatgatatagagaaacatggttataaaataaaaaacccttatacgggttttttattttgcaatcattcatcacccgctactgctcgaaggcgctgcttttgatattgtatgagaagatggtcaagctcctgactgagctctatcgtaatatgagatgtcattccgttcgccatgacaatttgcagcagctctgctctttttttttcaatttcttttaatagatgctctctaatcacagggatgtatcctttcatacattagatcttcaaagtgaatgtttatattatatccatatttatactaattttcaaatgagaaggagtataatgtctcaatgtcaaattaaattatataagttttttctgaaaatagaaatccttcaagtgaaagtgttaaaaaaatgaaatgattttgtcataacttgaaggaatgtcaaatcatgaagggatgatgacatgggagacgtgaattattttttgacattcggtgcgggttttttatcctttatttcgccttgctgcctgccgctttacccagcttttttgtcatatattacaggggtcagcatggacgatgtaaaaacagaaaagctgctgctgcagaaaagaagcctgtttcatactttgtgttttttgcttggcttttcagtcatttttattgctttaggctatggaacatcttttattggcagcctgtttagggattatcacgatgcgattcggcaaattggcgcgttgcttattattttgttcggtttcattacactcggtgtgttccggcctgaggctatgatgaaagagcggagaatccattttaagcataaaccaagcgggtttttaggatcggtcttaatcggaatggcatttgcagctggatggacaccatgtaccggtccgatattaggtgctgttatcacacttgcaggcaccaatccgggctcagcggtgccatacatgatgttatatgtactcggtttcgcggtaccgtttcttttattgtctttttttatcacaaagctgaagtggataaggaagaaccagcttttcattatgaaagctggcggcgttttgatgattgtgattggtgtgctgttattctttaattggatgagcctgatcattattttgctgtcagatctttttggaggctttactggtttttgacggtaaattactttcgtactactactaatccttttgtttttggtacaataagactattatctgtggaaatcgattgttggaggggaatatgacaagagttttagttgtagacgacgccaagttcatgagagtgaaaatcagagagatcttggaagaggcaaattacataatcgcaggcgaagcggcggacggtgaacaagcagctgacctgtataaaaaactgcgcccggaccttgtgacaatggatattacaatgccggtgaaaaacggcataaaagcgcttcgtgatatcttaacctttgatcctaaagcgaaggtcatcatgtgcaccgccatgcgccagcaaagaattgtaacggaagcaattgagctgggggcaaaggattttattgttaagccgtttgaggaaacaaaagtgctggaagctgtaagccgcgttatgggacattaaagtcatttcttttcaaaatggttttttttattgttttggagtatagtatatagtatcaacactccgagaaacaaaggaatgataagtatgatgattatagtttcatcgattattgctgtgttaatggctgtagctgtgatggtggtcagaataaagtcctctgacaagcctgtttcaccaaaaaaaatcattctcccgccgatttttatgagtacgggagcgttaatgtttttatttccggtattttgggtaactggtgcagagtttttggaagcattcactttaggtgtgattttctctatttttctaatcaaaacttctaagttcgaaattaaaaataatgaaatttacatgaaacgctctaaagcatttgtttttatattagtcggtcttttggtgatcagaatcgtgatgaaatcgatcttgagcacatcaattgattatggtgcactgagcggaatgttttggattctggctttcggtatgattgtgccttggagaatcgccatgtatttatcatatcgaaaacttcataacgagctgcagtcatctaatattcaaatgaattaaaaaacctttcctcttgtcaggaaaggttttttatttgagaagggtctgataaggttccaaatcgatttttttgtcccgcagatgcctttttaagaaggtatggtctcttttaggagttgcgagaatatagcctttgatcataagttgctgatcaatctttgctaccttttcttttaatgcaagctcaccgattttgcctgcgattttagcttttgctgcatctctgaacagctctggcacgggcgcagtcaattcatctagaaactgtttgttttcatcgttccataaatgtctgctgttttcaatatagtaatcctgccaatcaagctctgatctgccgtcctcttttggtaaacgctttaaaaactttcgaaacatgaaaaaaccgccgattgataataagactaccatcatgatcacccaaaacagaataaaccataaaaaccatccttccagcatcaatcattcccccttattctaaccatattgtatacgaagagagattagaagaacacagtaaaaaaagaatagaaaaaagtgatagacgtctagtcaaaagagatagtagatcatattctattgtatagtgaatctgctatttggccatgggagagtcactagagggtatttgacgataaatggacggaaaaaaaagtcactttcataataggggatgaaagtgactttttatgtttagctgagaggaaattgaagagaaaaagaagagccatcttctgtttctttattgacggcgactgtgagtatttgattttcgcattcggcttgaatggttttgtcattaaaataaaaaggaagcatcatttgtttttcaaaagtctgtcctgacgatttgactgttaagatgaactcgcatccagaaagggtaactgttacttgtgtaggctgtaaaaaagtcagatccgcttctataatatactgctgacttgtttcatataaatcaataggcaatgtttcgtcgtaccaggcgaaggggtcttcaaaaaattgccgaagccattcatccatactatcgaaatcattcgcatcgttgcgttttgaatggttcatggaagcattcctccacatatcaaccttgctttacatcatatgcggtggattataaatgggtgaacgcataaaaaaacagacactaaggtctgcttttcttacatatcatggcttgagttgtgcttttgtcttgtatggtttcggttctttacttttttgcttccgcttagaggctcaggttggccgggattgtgtcctttaggggcgtttttatgcatatctttacttgtattcttattggtcataaaatgagaacctccttaaaagagttcggtgttattgattggtttttctttttttgttattttggcgttctgcttcagtcagtacaagctggtcgttttcaatatagccggcgcctttgccttggctttttgcgtcattcattccgttaatgacgtgattcgcttttcttttgaccatcattatcacctcaatcataatatggcttcttttattgtgttatatgagagagcgtaaacagtaaaaattaccggtacatttttctcataagtcgaacttattgtatttaataaaaacattgatatttacttatgtatgattttgttttaatatgaaattgtgagaaaattgtgatggaatgtaatgttcatctgagaatgatctgatctgaagggggattttggagaatggcaaacgagcaaaaaactgcagcaaaagacgttttccaagcgagaaaaacgtttactacaaatgggaaaacatatcattactactctttaaaagcgttagaagattcaggtataggaaaggtttcgaagcttccttattccatcaaagttcttttagaatcagtattgcgtcaagttgacggcttcgttatcaaaaaagaacacgtggaaaatttggcaaaatggggaactgccgaattaaaggatatcgacgttccgttcaaaccgtctcgtgttattttacaagacttcacaggggttccggcagtagtagatctggcttcactgcgtaaagcaatggcagctgtcggcggagatcctgataaaatcaaccctgaaattcctgttgatcttgttatcgaccactctgtacaggtagataaagcgggtacagaagatgcattagcagtaaatatggacttggaattcgaaagaaatgcagagcgctacaaatttttaagctgggcaaagaaagcgtttaacaattatcaggcagtaccgcctgcaacaggtattgtgcaccaggtcaaccttgagttcttggcaagtgttgtccatgccattgaagaagacggcgagcttgtaacgtatcctgatacgcttgtcggaacagactcacacacaacaatgattaacggtatcggtgttctcggctggggtgtcggtggaattgaagctgaagcgggaatgcttggacagccttcttacttcccagttccagaggtaatcggcgcgaaacttgtcggcaagcttccgaacggaacaacagctactgacttggcgttaaaagtaacacaagtgctgcgtgaaaaaggcgttgtcggtaaatttgttgaattcttcggaccgggaattgctgaactgccgcttgcagatcgcgcaacaattgcgaatatggctccggaatacggtgctacatgcggattcttcccagtagatgaagaagcgcttaactacctgcgcctgactggccgtgatcctgaacatattgatgttgttgaagcatactgcagaagcaatggcttgttttacactccagatgcggaagaccctcaatttactgatgtggttgaaattgacctgtctcaaattgaagcaaacttatcgggtccaaagcgtcctcaggatttgatcccgctatctgctatgcaggaaacgtttaaaaagcaattagtcagccctgcaggtaaccaaggattcggtttaaatgctgaggaagaaaataaagaaattaagtttaaactccttaacggcgaagaaacagttatgaaaacgggtgcgatcgccattgctgcgattacaagctgtacaaatacatcaaacccatacgttctgatcggcgccggactggtagcgaaaaaagcggttgagttagggcttaaggtgcctaattacgtgaaaacgtcacttgcaccgggttctaaagttgttacaggatatcttgtgaattcaggccttcttccatacatgaaagagcttggctttaacctcgttgggtacggctgtacaacatgtatcgggaactcaggtccgctttcaccggaaatcgaagaagcggttgcgaaaaatgatcttctgattacgtctgtcctttccggaaaccgtaactttgaaggacgtattcacccgcttgttaaaggcaactatcttgcttcaccgccgcttgttgtggcatatgcgctggctggaacggtaaacattaacttaaaaaccgatccaatcggtgtgggcaaggatggtcaaaacgtatactttaatgatatttggccgtcaatggacgaaatcaatgcacttgttaagcaaactgttacgccagagctattccgcaaagagtatgaaacagtatttgatgacaacaagcgctggaacgaaattgaaacaacagatgaagctttatataaatgggataacgattcaacttacatccaaaacccaccattctttgaagagatgtctgttgagccaggcaaggttgagccattaaaaggactgcgtgttgtcggtaaattcggcgattcagtcacaactgaccatatttctcctgcgggggcaatcggaaaagatacgcctgccggaaagtatttgcaagaaaaaggtgtttcacctcgtgactttaactcctacggctcccgccgtggaaaccatgaagtcatgatgagaggaacatttgccaacattcgcatcaaaaaccaaatcgcaccgggtacagaaggcggatttacgacgtactggccgactggtgaagtaacatccatctatgatgcatgcatgaaatacaaagaagataaaaccggtcttgtcgtattagcaggaaaagactatggtatgggatcttcacgtgactgggctgcaaaaggaacaaaccttctcggcatcagaacggtcattgcagagagcttcgaaagaattcacagaagcaatcttgtattcatgggtgtgctgccgcttcagtttaaacaaggtgaaaatgcggatacactcggcttaacgggtaaagaagtcatcgaggtagatgttgatgaaacagttcgtcctcgtgaccttgtgactgtaagagcaatcaatgaagacggcaatgtaacaacttttgaagcagtcgtccgctttgatagtgaagttgaaattgattactaccgccatggcggcatccttcaaatggtgcttcgtgaaaaaatgaagcagtcctgatgaatcaataggaagagaaggcatttcgctttctcttctttttataacacaatgtgctgcggaggtggcatatgctgaaaaaatggctcgcagggatcctgcttatcatgcttgccggttatacgggatggaatttatatcaaacatacagcaaaaaagaagtcggaattcaagaggggaaacaagcacctgatttttctttgaaaacgctgtcaggagagaaaagctctttacaggatgcaaaaggcaaaaaagtgctgctcaatttttgggcaacttggtgtaaaccgtgccgtcaggaaatgcctgcgatggaaaagctgcaaaaagagtacgccgacaaacttgcggttgttgcggtaaatttcacttcagctgagaaaagtgagaaacaggtccgagcgtttgctgatacgtatgatttaacattccccattctgattgataaaaaagggatcaatgctgactataacgtgatgtcatatccaacgacatatatcttagatgaaaaaggtgttatccaagacatacacgttggcaccatgacaaaaaaagaaatggaacaaaaactggatcttgattagattcagtttttttatgctcagatatgcttacaagttttcagaattggaaaaaataaaagaatatgcggaggtgagaagcgtgaagaagatgagaaaacgttcttttcatgagctcgtcatggaaaacaaaaaagagctgatgaccaatacagagtatttaaatcagcttgaggaaaagcttgaacagcgatttaagcaaaaataacctttaatttgtattcatgtttacccctccttttgagaaacctatctgttgaggagggataaacatgggaaacaacaagaaaaacggtcagcctcaatatgctccaagccacttgggtacaaagcctgtaaaatataaagccaataaaggggaaaaaatgcatgatacttcaggacagcggccgattatcatgcagacaaaaggcgagtagcgaaaattcgagtttatttctaggaggtacatccgaatgacaaagaaccaaaatcaatatcagcagcctaatcctgatgatcgctctgacaatgtggaaaaattgcaggatatggttcaaaatacaattgaaaatatagaagaagcagaagcatcaatggagtttgcttcaggagaagataaacagcgtatcaaagaaaaaaatgcaagacgcgaacagagcattgaagcgtttcgtaatgaaatacaggacgaatctgcagcgagacaaaacggataccgttcttaaaaaaccagggaaacctggtttttttctttctgatttgattatggtaaaatggggctaaattgacgttaagggagcagagtaatcttgcatgtatcaaaaaaagaaatagaagtgcgttatgcagaaacagatcaaatggggattgtctaccacgcaaattatcttgtgtggatggaggtcggcagaacggccttaattaaggacttaggctttttatatagtgatatggaaaaaagaggcgttctgtccccagtcgttgatatcaatatttcctataaaaagccgcttcattacggagaaaccgcggttgtacatacatggatagaggaatataacggatttaaaaccgtctatggttaccacatctataatccggccggtgagctttccatcaaagccacctcatctcatatttgtgtggataaagaaagctttaagccaattcaattccgcaaagcttttcctgattggcacacagcatatgaaaaggccaaaaaatagggaagtgaacgggatatggcgtttggtgtgaaacgggaggaacttaaccgatggaaacaagcagtgaaaagaggagaaatcgcatttttaacacattactggctggatgaccgatttccggaagcaaggactgtaacaaaagccggctgtgcagacattgataagctggttcagtggggggcggcgtacgggttaaaaaaagaatggatccataagaaaagtgaatttcctcacttcgatctgctgggggaaacacaaaaatatattttggaacaagaaaacctaaccgatcatcttatacgatttcatttgtaaaaaaagaacgcacatgatgtgcgttcttttttattggtattcaaaaaccggttcatcagcgtcttctgaatagctgacgagaaggtcgtggttatcaaagtaccataaatcactttcttcaataaagaaggtaatgccgtcagcttctgcagtgactccagcctcttgtggggcatctttcgctacaccgagagaaaaacccttttgaacgttgctgcagcctccatagcggacgaaaaagcgaacctggtctccgctttccaaatcgagttcttctttataccagttcaatgcgtcttcgttaattgtcatattcataacagaacacccctttgttcttcatttgaattttctctattataaacgtattaggctattctgtgtcaaaagagaagttttttaagcttataaccattttactttaggttctgttttattgataattcgtttaatgttcgctcggtgtctgtatatcacaaaaatagtgagcagggtaacgacaatcaataaatacgtatcatggacaaagaaactatatataacagtatagatccctgttaacatcgatgagagagaaacaaatttagtcaagtataaaaagatgaagaataccgcaaccatcgtgataaataacaggggtgcgtaaaatagcaaaacgcctcctgatgtcgccacggctttaccgcctttaaatttggcgaagatgggaaacacgtggcctaaaaccgcaaagactcctgcaagaagcgggtgaatatcaacatgcatgagaaaaggcaatgcagttgccagtgtccctttcaaaatatctccggctatgacgaccgaaccagcttttacacccaatgtacggaatgcattggtagcgcctaagttgccgcttccgtgctcccgaatatcaattcccttggcaagcttgcccacaattaagccagatggaatgctgcctatcaagtaggccaaaataatcaataaagcaattaacatctacatttctcctttttcaaattcccttctttttattttaacatgagatgtcatgatctgatgataagtttttttgtaaagtttgcttacaaatccaatcaaacatgcatcatattttgatttctcctgttttgatcgtgtaaaataagtaaaaaaggagtgacacacgatgcaaaacccttctaaagcggaaattaaagagattcttcaaagaagcaaacgtatagcggtagtagggctttcagaccgtccggatagaacatcacatatggtttcaaaagcaatgcaggacgcgggttatgaaattatccctgtgaacccgacaattgatgaggccctaggtgtcaaagccgtttcatctttaaaagagattgacggtccgattgacatcgtaaatgtattccggcgctcagaacagcttcctggagtggcggaagattttttagagacagatgcgccagtattttgggcacagcaagggctagttaatgaggaagcataccagatgctaaaagaaaaaggcagaacggttatcatggatctgtgcataaaagtggcacacgctgtaacaaaataggtgcagaactgcaaaaatccttgtaaattcaaggatttttgctttttaattttaagatattgtttgcgtattacggtgaaacagatacaataaagcttgaacagctttttttgaataccttgtccagctgggtttcggccgttcgatttgcgaaggtctgctgctttatatataataaacaaacatacgttcttatggtgtaaaaacagcactagccgatgttttgagaagaactgattcgttagctctatgttgcgattgcaaacatattggttataatgaggagtccaaggcagtactggctcgaggcgaggtttataaaaaatatcttatatacaaatgatgtgtaacactgaaaaagagaaagacaatgttagtttttgaaaggggtttgtacgtttggctagaaaacagcaatttgattacaacgaagatgccatacaggtgctcgaaggccttgaggctgtcaggaaaaggccgggtatgtatattggctctactgacgcgcggggtttgcaccacttggtttatgaaattgtagataactctgtcgacgaggtgcttgccggccatggagatcacataatcgtcaaaatacataaagacaatagtatttctgtacaggatagaggccgcggcatgccgaccggaatgcataagctcggcaaaccaacccctgaagtgattttaacggtgcttcatgccggaggaaaattcggccaaggcggctataagacaagcggcgggctccacggagttggtgcatcagtcgtgaatgctttatctgaatggctgacggttaccattgagcgggacggttttgtctatcagcagcgatttgaaaatggaggaaaaccggttacatctctcgaaaagatcggcaaaacaaaaaagacgggaactcttacacactttaagccagatccaacgatgttcagcacaaccacttataattttgaaacgctctctgagcgcttaagagagtctgcgtttttgttaaaaggactgaaaattgagctgattgatgaacgcaatgaccagcatgaggtcttttattatgaaaacggcatagaagcgtttgttgcttacttaaatgaagaaaaagacgtcttgtctgaagtggtctcgtttgagggtgagcatcattctatagaagtggactttgcgttccagtttaacgatggttattctgaaaatattttgtcgtttgtcaacaatgtcagaacaaaagacggcgggacgcatgagtcaggtgcaaaaactgcgatgacgcgtgcttttaatgaatatgcgcgaaaagtggctttgctgaaagaaaaggataagaaccttgaaggcaccgatataagggaagggctttcagccattatttctgtccgcattcctgaggagcttcttcaatttgagggacaaacaaaaggaaagctcggtaccagtgaagcaagatcagcagttgatgcgattgtttcagagcagcttgcttactttttagaggaaaatcgggacaccgcaacgcttcttgtcaaaaaagcaatcaaggcgagccaggcgcgcgaagcggcacgcaaagcccgtgaagaagcaagaagcggcaaaaaacgaaaaaaatcagaagcgactttaagcggaaagctgacgcctgcgggttcaagaaacccggcaaaaaatgaattgtatctcgttgagggagattcagcaggcgggtcagccaagcagggaagagaccgcagattccaagcggtactgcctttacgcggtaaagtcattaatacagaaaaagctaagcttgctgatatctttaaaaatgaagagatcaatacgatcattcatgcgatcggcgggggagtcggggcagatttctcaatagatgacatcaactacgacaaaatcatcattatgaccgatgccgatactgatggcgcccatattcaagtgctgcttcttacctttttctatcgctatatgaaaccgctcattgagcatggcaaggtgttcattgcgctgccacctttatataaggtcagtaaaggaagcgggaaaaaggaaatcattgaatatgcatggtctgatgaagagatgggtgatgtcctgaaaaaagtcggcaaaggctataccattcaacgatataagggtcttggagagatgaacgcagaccagctgtgggaaacgacgatgaatccggagtcccgcacacttgttagggtcaaaattgacgatgcggcacgtgtagaaagacgtgtgacgacgttaatgggagacaaagtagagccgcgcagaaagtggattgagaaaaacgtcgctttcggcttagatgaagaaagcaatattttagaaaatgaaaacttatcggtcgctgaggaggtttaatgattgtcacagccagaattatttcatgatttaccattagaagaggtgatcggcgaccgttttggacgctacagtaaatatattattcaagacagggcgctgcccgatgcgagagacggattaaagccggtacagcgcagaattctgtatgcaatgcatacagatggaaacacgtttgataaaaacttcagaaaagcggccaaaacggtcggtaacgtcatcggtaactatcatccgcacggtgacagctcggtttatgaagcaatggtgcggatgagccaggattggaaagttcgtaatgtgttaatcgaaatgcatggaaacaatggaagcatcgacggagatcccccggcagccatgcgttatacagaggcacgattatctccgattgcatctgagcttcttcgggatattgacaaaaacacggttgaatttgtgccgaacttcgatgatacaagcaaggagcctgtcgtactcccggcgatgtttcctaacctattggtcaacggatctaccgggatttcagcaggatacgcgaccgacattccccctcatcatctgggagaagtcattgatgctgtcattaagcgtattcaaatgccatcttgctctgttgatgaacttatggaagtcattaaagggcctgattttccgacaggcggtattattcagggcgttgacgggataagaaaagcttacgaaaccggaaaaggaaaaatcattatccgcggaaaggctgaaattgaaacaatcagaggcggacgagaacaaattgtcattactgaaattccatttgaagtaaataaagcaaaccttgtaaaaaaaatggacgagttccgtattgataaaaaggttgaaggcatctcagaggttcgtgatgaaacggatcgaacagggctgagagtggtcattgaactgaaaaaagaagctgatgccaaaggcattttgaatttcttatacaaaaatactgatttgcagatcacatataacttcaatatggtggctatccataaccgccgtccgatgctgatgagcctgccgtctattttggatgcatatatcggacaccaaaaggaagttgtcacaaaccggtccgtttatgagcttcaaaaagcaaaagacagacatcatatcgtagaagggctcatgaaagctttgtctattttagatgaagtgattgcaacaatccgttcttctagcgataaacgtgacgctaaaaacaatttgatcgcgaaatatgaatttacggagcctcaggctgaagccatcgtgtcattgcagctatatcgtttaaccaatacagatattacagcgcttaaggaagaggcagaagagctcggtaaaaaaattgaagagctcgaatctattctgagcaatgataaaaaactgctaaaagtgattacaaacagcttaaaagcattgaaaaagaaatatgcagatacgagacgctccgtgattgaagaaaaaattgaagaaattaaaatcaatctcgaagtcatggttgcatctgaggatgtatatgtaaccgttacgaaggatggttacctaaaacggacgagccagcgctcatttgccgcttccaacggtcaggacttcggaatgaaagatacggacaggatgctgcatcagtttgaaatgaatacgacagacgtgctgctgctctttacgaacaaaggaagctacatctattgtcctgttcaccagctgcctgatatcagatggaaggacatgggccagcatttttcaaatctgatcactattgaccgtgatgaaacgattgtaaaggccataccgataaaagaatttgatccgtcggcatatcttctattctttacgaaaaacgggatggtgaaaaagacagagctcacccattataaagcacagcgttattctaaggcgcttgtggccttaaatctgaagggtgaagatgaactgattgatgtacatgtaacaaatggggaaagccagatctttatggccactcacttagggtacggcctatggtttggagaagacgaagtgaatgtagttggcgcacgtgcggcaggtgtcaaagggattaacttaaaagaggatgactttgttgtctccggtgagatccttcagcaatctgattcaattgtcttgttcacacagcggggagcggtaaaacgcatgagtctttctgagttcgagaagacatcccgcgcaaaacgcggtgtcgtaatgctaagggaactgaaaaagaatcctcaccgtgttgtagcactgttcgcttgcggtcttgaacagcgactaatggcagaaacagaaaaaggcgacagaaaagaactgcaggcaaaagagttgcggacaaacgacagatacagcaatggctctttcttttttgatgaagaggaatcaggcaaggttacagctgtttggcgacttcatacagaacaataataaaaaacccgctcatatagtatgagcgggtttcgtttgttttttatcagctttcatggttggtgaatagatctgttacagcatgaatgacttcaatcccctgccatacaaataaattcagcgctgtgaaagaaaataagcctaaaatcaccattcttaagataaacaacatgtttaacagcctcctcatattttcgttacataatcgggtgatgttgaacatgaagtttgccgaaataagacgattgataaaatttggccagtataaagctttttttccgctgacgtctgcgggagtatcccgtacttttgctttcagcggtcagcagcagaacagccattgcccataaagcggtcagcgtaaatgcccctgtgatggatttcttctcatcatcagcattttggccgactttcatctcatgcatttcctgctggtcggctacggctttataatgatggccgatatcaaaggcgtggggaattgagaacaaatgaaaactggcaatcgccaagaataagatggatgctttcaatatcgttacttttttcaaatgatctccccctcctttaatattactgaatatttttataataataccccaatccatcctaaaagtaaacgtgatttattaaatttaaaaataaatttaaccttgttaagtatatatctttttgcttatttttgaaagagaaaacttcttttattagcgtatgtatacccggtttatggtgtgaataaaaacatattttaaatgatatgtttgttgtttagggtttattactttatttatgtgttaaatcaaagggaaaggcaagagaatgggaagaaatgattacattgttaatagggcactcttttttaaaagccagcttgcaaggaatgtttttattcgtaggaaaataatagagaaggggtcgacagagtaacatctggctacgacaatattcttctcgaaaaaacttcctaattcgtcatattgtgatataataaaactcgttatgttaaaaaatctaacatcaaaatcgaattcgtgttgaattgatgaaaacgggaggtaaatatggagtcttttttcaatagtttgattaatattccaagtgatttcatctggaaatacctattttatattttaatagggcttggattattttttaccatacgttttggttttatccaattccgttattttattgaaatgttcagaatagtaggggagaagccggaaggaaataaaggtgtttcatctatgcaggcattctttatttcggccgcatcccgagtcggcacagggaatttgactggtgtagccttagcaattgcgacaggcggaccaggcgctgtattttggatgtgggtagtagctgctgtaggtatggcttcaagttttgttgagagtacgttagcgcagctttataaggtgagagacggggaggatttccgcggaggcccggcctactacattcaaaaaggtcttggagccagatggcttggcatcgtttttgcaatcttaattaccgtctcattcggcttgatttttaacgctgttcaaacaaatacaattgctggagcattggatggcgcattccatgtgaataaaatagttgtagccatagttctggcggttttaactgcgtttatcattttcggcggtttaaaacgtgttgtcgctgtttcacagttaattgtgccggttatggcaggcatttatattcttatcgctttatttgttgtcatcacgaatattacggctttccctggcgttatcgctacaattgttaaaaatgctttaggttttgaacaagtcgtcggcggcggaataggcggcatcatcgttatcggtgcgcagcgcggacttttttcaaacgaagcaggaatgggaagcgcaccaaacgcggctgcgacggctcatgtatcccatccggcaaagcaaggctttattcaaacattaggcgtatttttcgatacatttatcatatgtacgtccacagcatttattattttgctgtacagtgtaacaccaaaaggcgacggcatccaagtaacacaggctgctcttaaccatcacattggaggctgggcgccgactttcatcgcagtcgcaatgttcttgtttgcattcagttcagttgtcggcaactattattatggcgagacaaacattgaatttattaaaacaagcaaaacatggctgaacatttaccgtatcgctgtaattgctatggttgtgtatggatctttatcaggcttccaaatcgtttgggatatggcggacctctttatgggtatcatggcgctgatcaacttaattgtgattacgctgctgtcaaacgttgcttacaaagtgtataaagattacgcgaaacaacgtaagcaaggacttgatcctgtgtttaaagcgaaaaacatcccagggctgaaaaacgctgaaacatgggaagatgagaaacaagaagtataatataaatataatgaaaaagctgcattcaatagttgaatgcagctttttcattattggaaataaatttaatttttcgactcgaatgaaaaatgacgtgtaaagtcccaattcagtccagttttctttgttctatatgtgtcatgtgtgtcttattcattggaggtagagcaaattgacaggcttttaaacctcccaaaaacaagaaattaggttgatagacaatcatgagaaagatttttacaatgagttcgtgctcataagaagtgtagagccaaaatgatgcgaaggaggaaaagatcagatatgaaacggtcaatctctatttttattacgtgtttattgattacgttattgacaatgggcggcatgatagcttcgccggcatcagcagcagggacaaaaacgccagtagccaagaatggccagcttagcataaaaggtacacagctcgttaaccgagacggtaaagcggtacagctgaaggggatcagttcacacggattgcaatggtatggagaatatgtcaataaagacagcttaaaatggctgagagatgattggggtatcaccgttttccgtgcagcgatgtatacggcagatggcggttatattgacaacccgtccgtgaaaaataaagtaaaagaagcggttgaagcggcaaaagagcttgggatatatgtcatcattgactggcatatcttaaatgacggtaatccaaaccaaaataaagagaaggcaaaagaattcttcaaggaaatgtcaagcctttacggaaacacgccaaacgtcatttatgaaattgcaaacgaaccaaacggtgatgtgaactggaagcgtgatattaaaccatatgcggaagaagtgatttcagttatccgcaaaaatgatccagacaacatcatcattgtcggaaccggtacatggagccaggatgtgaatgatgctgccgatgaccagctaaaagatgcaaacgttatgtacgcacttcatttttatgccggcacacacggccaatttttacgggataaagcaaactatgcactcagcaaaggagcacctatttttgtgacagagtggggaacaagcgacgcgtctggcaatggcggtgtattccttgatcaatcgagggaatggctgaaatatctcgacagcaagaccatcagctgggtgaactggaatctttctgataagcaggaatcatcctcagctttaaagccgggggcatctaaaacaggcggctggcggttgtcagatttatctgcttcaggaacattcgttagagaaaacattctcggcaccaaagattcgacgaaggacattcctgaaacgccatcaaaagataaacccacacaggaaaatggtatttctgtacagtacagagcaggggatgggagtatgaacagcaaccaaatccgtccgcagcttcaaataaaaaataacggcaataccacggttgatttaaaagatgtcactgcccgttactggtataaagcgaaaaacaaaggccaaaactttgactgtgactacgcgcagattggatgcggcaatgtgacacacaagtttgtgacgttgcataaaccaaagcaaggtgcagatacctatctggaacttggatttaaaaacggaacgttggcaccgggagcaagcacagggaatattcagctccgtcttcacaatgatgactggagcaattatgcacaaagcggcgattattcctttttcaaatcaaatacgtttaaaacaacgaaaaaaatcacattatatgatcaaagaaaactgatttggggaacagaaccaaattagttaagcttttttttggcggacatcagtaacgatgtccgtttttatcatctaataggaggtttgcgttgtggatgaaatactgaaacagtatatggtgctgtataaaaaaatgagtaatatgataaatggtcccgactatccaggtaaggaaaaagacatccagcatcaaaaagatcagatcgaagtttacgaaaaacagctgcagcaaggattttctacagattatgactatgatgtgtttgctgattctgttatcaaatgcgcatatggcgatatgacgctggaagatttagaagccgtttattatggattgacaacaccatttttttgatttgtcattcagcagtaaaatttcaatttctgtctcactaacttaagtatactttgatattgagacagaaatttatttattttgtttacttcctagaatatatattatgtaaactagaaaagatgaagattaaagctttgctgtttttatgtacatcctttcttcttcctgtaattcagcaacaaaataaaaaagcgatttcccaatcggaaaatcgccaattcagacactctattatttatgagtgtctttgtgctcttaacgatttacaacaaatgttgttacgctttgagctggaagatgggcccaaaaatgattgcctgatacagtgagattcgttccaggttgtagattgctgctgctgctcgtgatccatctagatacgtttgaagcagatccattctgcaaaacaaagttttggttgacccctgtgttgcttttattgatagcaacaataacgaccttgttgtcacctttataggctgacacgtaaacgttcgcattagggtttttcgttgcatcaatccttacatagccgggacgcacaaactttgagaaatgagccatattgtagccgcgtttgctgatcgtaccatcttctttcataggtccatatgatcttcgaatgtaccaccatacataagcttgaaagtccccctctaccatcgcattgtgaatatgctgtgaaacatccaatgcctcaggccatcgatccgccgagttgttatcactgtttggatagtatacttccgtcatccaaaggtccttccccgctcctttttgtttgaaaagaggataagggaattggctgacctgggtgccgtacaggtgagttccgagaatatccatattggcaagagcctgcggatcgttcaagatcgggtccgacaaattcttcaagtattgaaatgactcaggcgcaatgacgcgggcattgatcgagccggcgttttctctcataaagcgaagtatttcttgcggcgtccaccacgtccactcgtgagcgtaatcaggctcgttttggaccgaaatcgcgtaaagattcacaccattattcttcatgaaggtaacaaaatcgttaagatgctgcgcgtatgctgcgtacttgttgtatttcagccgcttagctgatgtgtcaccattccgattgaaggtctcaaccatatcacttggaggattccagggagatgcaaaaacgattgccccatgtttgaccgcactcttggcagtctccacctctttataccaattatttcgattttcatctacatgaattcttaagattgaaaatcctaactggttctgtccattgccaaaagcagtttctctttgagctgctgtaagatccccagcccaagcgggatgattcatccctccaaaaccgcgaatcacttgtttctctgcagatacattaactgttacatcactggctgccaaaacttcagtagcgcctggccctaacatgactgacagcatagtgaaacatactaatagtacacaaattgttttttttatgcgtggaatcatttattcctctccttcgtcatgtgtcttttacggtattaaaaaatctgcatggcatatccataatggcgggctgttccggtgatggcccgtacttcacccgcctcgtttttaagcggtcccattacgagtcctatctttgcgtaaactgccagtaatcaaaattaaacaagtttcctgtacctgttccggtaaatacaaagaatactttgtgcacaccggttgccccgcttacttcagtttctatttctctccacgtttgcgctccacctgtggaaggtacattcagagttccaacaagcttaccatcagcactgtcgaggcgcacttctatttttccgcctaaagtggatgctacatttgctttaaatgtcctggcaccgcccgctccgaagtctgcatttcctacagcaatccagtctccattttgaatgcttgttacatgctgattatttactggcccgccgggtgctgtggacttctctgtcaaaatgcgtccattccaagcaaacgtttcagcttctacccggttataaggattcaaattggaaagctgtgttacacctgcataatttgctgctacctcttggatggatccatctgggttatgcaccagcttattaatatggggagaacggtatcctttgccggccccgaacagagcggaactgacagtttgcgcatggtacaccacataccactcgtttttaaaattgaaaacagcatgatggttgtttccgccgcctccgaaaaatgcacccggatttttcaggaagtgccctctatatgtaaaggggcccatgggacttgaactggtcatgtagccgatctcacccgggggtttatcggccggatgtgtgccgccgaaattgatgcaataggagtaataatatgttccgttatacttgtgcaatccggaatcttcaaacatgaaaggcgcatcaattgtagatgcacttccctcaacactcgtcatatcaggccctaattttatgacccttgccgttttaggattggcccattgtccctgcgttggatttgaaccgccaggaacgcctccgccggcatacaggtaaccggttccgtcgtcatctacaaatactgccggatcaaaaagccatacaacacctgacattcctggcgtacttggcgttacgagcggttttccgattgggtcggtccatggaccaatcgggctgtctgcggtgagaaccccgatacctccgccgctgtttgcgaaataaaggaagaatttatccttgccattaatttttttaactgcgattgacggtgcccaggatgcacctgcccattttgcaattccacggcctccattagctccattggcacctgctaccggaatggctccgtggtctgtccagttcaccatatccgctgaagatatgacgaatactctattcaaattggcaaatgaattatctttaatcgttccgttgctattatattcatagtcatcacttgacatataaatgtagactcttccgttataggtcagcgcaatcggatctgctcctaaatgatggtcgataagcgggtttgaattccctatatgttttgcaattgtagtacttgtggcagcatacgcagacttcccagataagcagctcaataataaaactagaatccataaacatacgctacactttttcctcatcacttcacatcctcctttttctttaaaatgggggattttcttttggaatttgatgacaacaggtcacgaagattgcacgcataaagtagccggaagctgtttagcaatgttcccagttgttctgaaagctcatcttcatgtgtctccattctctcttttcttcgaggagatcgcaccactccttcaaaattgttcaaaaaaactttcccattcctagcgaccattgtccagaaaataaaaagacaggattgttcatggcctcccactaatcacattgaacggagattacatcattatccaagatatccctttatctaacatcctacatcattaaaaaaattgtgtatagaaacttttggaggagttagtgttcgattctacaaaggaactggatacatttattcattgataagatggggctaacactccttttatatttttatgtaaagatagttttcagacacaaaaaaacagccgtcaatgcggctgttttttcaagagtataagaactattgagcggtatacccgctttttcatgttttgttcatattttattaattgtttattcaacactgtccgctatagtaatccatatcaacaaatatgactgccactcgcatcttttatgaagggaggttcgttacgctgaaagaaaaaataaagacattaggccgtttttgcaccgtaggcgtcggcaatacgctgatagattttggtgtcttctttcttcttaccgcttgtcatgtctcttatctgccggcgcagatctgctcctatactgcaggtatcgtcaacagctatgtgtggaaccggaattggacgttttgtgtgaaaggtaaggctgacgggaaagagatcgtgcgttttctcatgattaatattgccgcgtcggggatcacctttttgctgctttatttgtttcaaaattgcggctgctcgcttttggtgagtaagctcgccgccactatcggcggaatgatgatgaattttatcggaaaccgaatctgggtatttggagattcgctgaaaaacatacaggatcaggagtgaagatgaatgagaaaaaaagtgagaaaagcggttatacccgcagcgggtttaggaacgagatttctgccggcgacaaaggcgcagcctaaagaaatgctcccaatcgtcgacaaaccagcaatccaatatattgtagaagaggccgcagagtcaggaattgaagatatactgattattacagggagaaacaaacgctcgattgaagatcattttgatcggtcggcggaattggaattcaatctccgggaaaaaggcaagacggagacacttaaggaaatgcagcagattgccgatttggccaacattcattacatccgccagaaagaaccgctcggattaggccatgcggtgctgtgtgcggagcattttatcggagatgagccttttgccgttctcttaggtgatgatattatggtgtctgaaacaccggctcttcggcaattaatggatgtatatgacgtttatggcacagaggttgtcggtgtacagtcagttctccctgaggatgtcagcaaatatggtattataaatacatcagggtctcaagggcatgtatacgaagtgaacgatttagtggaaaagccttctcctgaagaagcaccttcggaaatcgcagtaatgggacgttatgtgctgaattcttcgatcttctccgttttgaagacaattggcagaggcgcgggcaacgaaattcagctgacagatgcgcttcgtgaggtttgccgtaaggagccgatccatgcccggctgctggaaggaaatcgatatgacattggcgataagctgggctgttttaaagcgagcaccgaaatcggcttaatgcgtcccgaaatgagatctcagcttttggcctatttagaagatgtgatcaaacgggaaacgaaagaaatgctgcggtaaaaaaattgtaaccatcttgctcgtcaatcagtcatataatagtgaaaaagattaggacaggttgtgaagaatgtgggcagtttgataagcgaaattttaacatggctgacgaacatgggatatgcgggtattgcgattgggttaatgattgaaatcattccgagtgagattgtattagcttatggcggctatatggtatcggagggcacgattggatttattggcgcaattattgcgggtgttatcgggggcaccattgcccagatctttatttactggatcggtcgctatggcggcaggccatttctggacaaatacgggaagtatttattgattaaaaagcatcatatcgatatgtcggaaaactggtttcagaaatacggcgccggagttgtcttctcggctcgttttataccggttgtcagacatgccatatccattccggcaggtattgccagaatgccttttctcaaatttgtggtactgactgtgcttgctatcattccatggtctatcctgtttgtttatttaggcatacagctaggaagccagtgggatgatgttgagaatatagcaggcacttatacaacaccgattatgatattggctgttgtcgtgatagccctttattttgtgattaagaaacgtacagccatatttaaacgatagctagcggatatgcataggggtgactgacgctcccctatgcatatttttttacttgcgatgttgatttgccagcttcagattctccgctaaaaatgcgacaaacacttcatcccgcacgagcgatgcggcataatttctcttaataaaccattctgcctcttcaaacgctgcgaatgtttcgtcttgggtttctccgttaatttgaatattccattcgttgtctaaagggaaaagaaaaaatctcatttgtgcgcgattttcatataatgatccattcgcagatccctttagattatagatgttacggaaggcatccggccgtacaggatcaatacggaaagcttcagctacaaacaactcgtatacttcatcggttattgaacagccggacgcttttgcatgccctccgccgccatatcggccggcgatttctgacacatcgatgtaatcatgaatggtgcggagactgactcgttttgaccccatgctcaaaatcgcaatgtaatcgaggtgcgggttatctttccctagcctgttccccagctctgaatggtacgattcagcgtgaacgatgcctacacagtgttcgtgaacaaaggtttgtaccatttcccttttctttctgcggaggtagcgctcgattttttcgtcttctaaatcaagcagtttttcttcaaaatcatcgaagaaaaattcgtcatgcgtggaaaggcgctggatcatttttgcttcaaattcatcgattgacagcaaaaagaaaagatcattaagccgcttcgcctgtttttgatcgtaccgctcccactcccatgtatcgtattggcggacgagctctgtgaattgatctaaggcgtttgtcggtttcatgaagccattttcaacgagatagccatataaaagcgatgtcgcggatgtgagccttccatcatcgtattccacctggacaaatccccattcatgctcattcaaatgaagggctgttttatgatggtctatgagcttcactttgccccctgcatgaacatactcattcaatctctcttcgttttcttcattgacggcgagatcggtgatgaataacgcgtcctgtctgttgctctccttcgctttttctaaaaagtactgcacctgtgcgtttaagccgttgacagagttataccggacctctacgtcttttccgaacgccaattttgctacgattccgcatcctactccgtccaagtcgttatgtgaatataaatgatacacaatgtaggcccctttttatgataaactgacaattgccgctagaggtgcggcagcctttatttactattctaaaaaaccaagcgttttatgcaatggtaattagttgacataatgttgttattgtaaatatacaaaggagcgctttttttgcgctcctaagttcttgcttttacaccggataaaccggatgctttcgattggtaaatgtcatttcctttgtcatgtatgccttgagccgtttggccagctcatcacgcagcgaattggctgggataacagcatcaatgatcatttctgaagccagacggtagatattgatgtcctctttgtattcctcccgtttgctgctgataaatgcggctctctcttcttctggcagctcggcgatttttttagcgtagacagcgtttacagcggcctcagggcccatgacggcgatttgggcggttgggagcgctagacagcaatccggttcaaatgccggccctgccattgcatacaaccccgccccgtacgcttttcggacaatgacagagagctttggaacagttgcctccgacatcgcagaaatcattttcgccccgtgtctgataatcccagcctgttctacttttgtgccaatcataaaaccggggatatcggctaagaacagcaatgggatatgaaaagcgtcacataaggtaataaacttagccgctttgtctgctgaatcgtggaataagacgcctccttttaccttcggctggtttgcaacaatgccgacaggctgtccgtggattcgtgcgaggcccgtcaataattccggtgcaaataaggctttgatctcaaaaaatgagtcttcatctatgacccgctcaatcagctcatgcatatcaaaaggtccgttttgattttgcggaatgacgtcggcaagcggagttttgaagtgttttggcgggcgtttctcatgaatgggcgctttttcttgaaaatttgccggaaagtaagacaaataagcccgcgccagctgtatggcttcttcttcagtttctgcaagaatatctccgcagccggagattgagcaatgcatacgggcgccacccatttcttcaagagacactttttctccaataaccatttccgccatccttggcgagcctaaatacatggaggcgttaccgtctaccataacgacgatatcacagaaggccggaatataagcgccacctgccgcagatggtccgaaaagcagacagatttgcggaatgcgtcccgataatttgacttgattgtaaaaaattcttcctgcaccgcgtctccctggaaagacattgatttggtcggtaattcgggcgcctgccgaatcgactaaataaatgagcggacagtttaatttttcggcggtttcttgaattctgatgattttttcaactgtttttgctccccatgaccccgctttcactgttgaatcattcgccatgacgcaaacggtttggccgccgattttgccgatagcggttacaactccgtcagcgggaagcccgtctgacatacattccgcaaaaaaagcgtcttctagctcaatgtcatcgtcaaagagaagggaaagccgctctctgacaaagagcttgcctttttcccgattgctttgatgatacttttccgctccgccttttcgaatccgttcagcccgttctgttcgttccttttcataatccatcagcattgcctcccttttatattcccttgtatacggcccgtcttttttcttgaaaggcctgaagcccttctctcctgtcttttgtcgggatggtttgttcatacgctttttgttcaatcgcaaggcctgtagcgagatctgtctccaatcctttattgattgcaaatttagcctgacggacagcgatcggtccgttggcagaaatggctgcggccagttcctctgcttttggcataaggtcacaaggagccgtgacatgctctacaaggccgatttcttttgcttcgtgtgcggtcacgcgtctgcctgtataaatgaattcttttgcttttcctctgccaatcagccggggcagcctttgggtccctccagcgcccgggataatagctaaccctgtttccggaagtcccagcacagctgattcagttgcgattcgaaggtcgcatgccaatgccaattctagtccgccgcctaatgcgcttccatttatcgcagctatgaccggctgcggcaaggcatcaagtaaagccgccgttctttgaatgagagatacactttccagaacctgatcttctttcagttttatccgttcctttaggtctgcccctgcacaaaacgctttttcaccggtgcctgtgaggatgacgcaacggatgtttgagttaaattcaatttcctggataatcatttgcaggtttctaagcatttccgctgaaagagcatttgctgcctgaggcctgtttaaggtgatcaacgcaatatgttcatttttaacagtaaaaagaatagaatctcccattgtatgcgtcctcccttttatcaagatgatttaaacacctgtaaatttctgctcggcagcggtttgcccattttttcttcaatccatttggccgcagatagcagtttttcgagctttacatttgttttgatatccatctgttcaagcatgtacacgatatcctcagttgcggcgtttcctgatgaacctggcgcatatgggcatcccccaagcccgcctgccgagccgtcgaacaccgtgatgcccatttggagtgctgtgaccatgttggccagagcggttcctctcgtatcatgaaaatgcagggcaatttgattagccgggaatcgtgccaaaagagcttcaagtacagtttccacttgggcgggattagctgctccaatcgtatctccaagcgacagttcagaaatcccaaattcaaatagagcttctgaaaggcgaatgacttgttcaatggggacatctttttcgtacggacagccgaaaacagtcgagaggtaggctcttgttgtgaggtttgctttttgtgcgtcgttgtttacttgtttgagtatatgaagggattcagaagtggatttattgatgttttttctgttgtgcgtctcgctggcggacataaaaacgcaagcctcgttaatgcctccttcaagtgcattctccagtcctctttgattcgggacaagtgccgcgtacgttacccctttttctcggtcgatgccttttgctacatcgatagcatctcgaagcgccggaatccatttcgggtgaacgaaggatgtgatttcaatatacgacagccctgtccgggaaagctggttgatccaggttattttatcctctgttgcgatccaaacgggctcgttttgtaagccatcacgcgggccgacttctttgattgtcacttttttaggatatggcatggtcttcctccaaattattgagtggaattgctcagttcgagcagtacgtctccttcatttacaaagtcgccttccttttttttgacttcttttacgattccgcttctatctgcaacgatcgggatttccattttcatcgattccaaaatggctacctcctggcccttttcgatttggtcgccggctttgacgtggactttccacaggtttcctgccatttgtatgctaaccgtcatgacaactgcctcctttataggtgttgtttcaaaaagtcagtcgtgacatccccttctttaaatgcctttgttgccgcagcctgtatgagaagcggaagatttgttttgattccttctacatggtagtcgcgaagcgctgtctccagtttttcaattgcttctgttctggactggcctttgacgatcatcttagcgatcatcgggtcataaaaaggggtaacaatgctgtcttttgctaccgcacattcgtgtctgactcctttatggtcagggagtgagaacgcagtgatcgtgcctggtgacgggtagaaggtcttggggtcttccgcgtatattctcacctctatcgcatgcccgtttcgtttgatgtctttttgagagaatgtgagtgtatggcccgcagcaattcgcagctgctgctcaactaagtccaggcctgttatttcttcagtcacggggtgttcaacttgcagtctcgtattcatttcgaggaaataaaaattttgcgtttggtcaactataaattcgatggtgcctgcgttcgtatagccgattgccttcgctgcttttaccgctgtttgcccgatcttcattcttagttcatcgtctacaaatggagacggtgcttcttcaatgactttttggtggcgcctctgaacagagcaatcacgttcaaacagatgtactgtatggccgtgttgatcggccaaaagctgaacctcgatgtgacgcgcatgttcaataactttttctatatacatcgacccgtcaccgaaaaaatctgctgcgcgctttttgtttccctcgtacgctttttttaatgcttcttcattttcaacacgctgcattccgatgccccctccgcccgctgaagctttcagcatgacaggatagccgatttgacctgcggtgcggcaggctgcctctatatctccgagggattcagaaacgcccggcaccacagggacaccagcagcctccattgcttttcgcgcttcaattttgctgcccatctttgcgatgatatcaggggaaggtccgataaacacgatgttttcttgcttgcagcgttcagcgaaccggctgttttctgataacaatccatatccagggtggatcgcgtcggcatttgcttttttcgccgtctttatgattctctctatatttaaataactttcactgactctcgattctccgatcaaataagcctctgtagcggcttttgtatggggcgcgtccttgtctgcttctgaataaaccgcgaccgttttaatgccgagacggctgcatgttcggataattctcattgcaatttctccgcggttggcgatcagtacttttgtaaacatgatttcacctcattgacttgatgataggttgaacatttcaatcgttttttctcgcagtttatatttttgaattttgcctgaggccgtcatcggatagtcatccgtaaaaataacataacgcggaattttgtggcgggcgattttccctttgcaataggctttaagctcatcaggtgaaacgcttttcccgtctttcagtttaatccaggctgcagcttcttccccgaatttggcgtcaggcacaccaacgacctgtacatctaaaacagcgggatgccggtataaaaattcttcaatttcccgcggataaatgttctcgccgcctctgatgagcatatcttttaatcttccagtgatgcggcagtacccgtcttcatccatgacagcaagatctcctgtaaacagccatccgtcatgattgattgcttttctggtcgcttctttgtctttataatagcctttcatgacgtgatagccacgggtgcacagttctccctgcatgcctctttgaacttcttgacatgtcccgggttctacaattttcacctcagtatgtggcagggcacggccggttgtttcgactcttcttatgaaggaatcatttgctctcgtttgtgtaatgactggcgaggcttcggtttgtccataggcgatcgtaatgtctttcatgcccatcctttcaatcacagctttcatcacttcacttggacagggagagccggccatgattcctgttcggagcgtcgatagatcatatgcatcaaaatccggatgatgcagctcggcgataaacatggtaggcacaccatggagcgctgtgcatttctctttttctaccgttttaaggacggtaacgggatcaaattcttgcacgggtatcatggctgccccgacggatacacatgccaaaaccccaaggacgcatccaaagcagtgaaaaaacggaacagggatgcacatgcggtcttgagaggttaaagccatacattcagcgatattagcagcgttattgatgacattgaaatgggtcagcatcacgccttttggaaaccctgtcgttcctgatgtgtattgcatattaatcacattgtctttatccaggctgttcattctctcttcaagctcagcatctgtcactgttttcgccaatatctctgtatcgtcccaatgatacatgccagacaatcgtttattgccaatatagatcagcgtttttaaaaagggatagcgttcagatttcagttggccgggctttgcttcttgcagttctggaattaaactgttcacgatgtctggataagaagtgcccctgtatgaatccatgataataagcgccgcggcatccgattgctttaacaagtaatcaagctcgtgtgcttgataattggtattgacggtcacgagcacggctccgatcttcgcagttgcgaactggacggcaagccattcagagatattagaagcccatatggcgacgtggtctccttttccaatccccatccgcatgagacctttagcggtttgacggcacagactgtcaaattgagcgtacgtatagcggatatttcggtctggatacacaacagcatctcgatcgggatacgcatcagctgtttgttccagcagcctgccgattgtggaatggatgagttcagccattcattgttcctcctttcttaatgataggaaagcgtttacatttttattttaaaagctgtctggcgatcacgagacgctgaatttcagatgtgccttcaccgatttccattaattttgcgtcccgcagcatccgttccaccccatactctttcatatagcctgaacctccatggatttgaatggcttgattgcaagctcttgtcgccatttcagatgcgaatagcttggcgtacgccgcttctttggtgaacgggcggttatgatctttcagccaggcggcttttaacaccatttgccgtgccagatcaatttccatcgccatgtcagcaagcttaaattgaatcgcttgaaatgaagaaatcggctgtccaaactgctttcgttctttcgcatatgccaatgatgcgtcaagggccgcttgagcaatgccgactgcaagagcagcgatggagatgcgaccaccgtccagcgtatatagaaactgtttaaacccttttgttggatcgccgagtaagttggccgcaggcactcttacatcctcaagcaaaatttccgctgtattcgaaccgcggacgcccattttatcgtacgggctcgtaatcgtaagtcctggtgtgtcagttggcacgattaatgcggagatgatgttttttccatctttgtttttgcctgttactgcagtcacaataactgtgcgtgcgtagcttgcattagtgatccagcacttttcgccgttgattacatactcgtcaccatttgaaatcgcttttgtttgagtgcctcctgcatctgagcctgcatttggctccgtcaggccgaatgatccgagtgctgtgcctgaagccagcggcgtcaaatgcgtccgtttttgctcttctgttccgaagtagtatagagggcttgcgcctagcgagaccgctgcagcatagcttaatccagtactgccgcaggctttgccgacttcttcaaccgctaaggcatatgaaatcgtatcaccgccagatccgccgtattcttctggaaatggaatacccatcagaccgagttcacccatttttttaaatgtttgcatcgggaactcgcctgtttgatctacatgttcagcgtgaggagcaatttcttttttcgcaaaatcttttaccatttcacgcaccatttgttgttcttttgtcagctcaaaattcacatcgtttcctccttcacatctttgtaacatcctattaggcgagttctataatcattccctgacaagaaaagtctgaaaattaaaactgaatcattttttatgtgataatatcagcgggatgagcaaatacatgcagtaggcgcataccatccatatcgtaaacgcaataacttggccctttgataaagccgggaagatgaggggaagattccaaagggaaatcgtatccatcaataaaccgaccgctgatccccatatacctagcttgatcaccgcgaactgtgattgatcgagtttttgatagagaaagaacacaaggcataaaacaagagcagtgcccgctcccaagagaagaaagttcggcaaaaaggcttcttcagccggatcagtcaacacagcatctccgaacagcacaaaaaataatgtggcacctaaccagactagaaatgaaaacgtaaaacacgtcctgtacgtgtttctcttcgattttacttagtactagtttctcagattccaataatggaaaatgtccaaacaccgcctccatattcatgtgaatctcacctttgttttttaaaaaaatacagcggtttaccatcgtttcctgtctccaaaatcactaaaaaagacgacttagaaagccgtccttctcatttcttattttgttgttcgtttggaagctttgctttcgttatgaagccggtctgctgaagtgacataatacgtatatttcttgttgggatctgccgtgttatctaagaaggtttgctgctcatgtgtttttctttgcgttgccagcaatgttctctgctttttcccttcggctctgtatatcgcataataggctgtttctttcgttttttgatttgatgggtgatctttaatctgcagaagattgccgtttttgtcttcggtgactttcgtaagcttcggtttttttggggcggtattgtcaagccaaggcatttgcggaaccagtgccggcttgctgtaaaggtcggcgataagcctgtctttgatgccaagcggatttttgttgagatccttgaggctgaaatgcatgcttcctttcaccagttcaagctggcggttcaaagtgatttgccgcacatattcctcagggtcggaccaaggcggatcaaaattgttattgattttatatgctgcctggccaatatataagtgaacaggcctatttttgacttcattgctccaccaatcagccagcacgtcgtacgccgctgcgttaaagccgatactccaataaatttgcggagcaatataatcgatgtcgccttcttggatccaatgtcttgtgtctgcatatagatcgtcataatttctgacgcctgcttttgtattcgatccggtcgggtcatctgctgcgtttctccatactccaaagggactgatgccgaatttgacatacggttttgcagctttaattgtttggttgatttgtttgacaagctggttcacattgtcccgccgccagtcatcgatattagaaaaagcgtcttttccgtattgttcgtactgtgcttgatcaggaaattcctgtcctgctattttataagggtaaaaataatcatccatatgaacagcatcgatatcataatgttttacgacttcttcaatgcctttgacgataaaatctctcgcttctggaatgcctggatgataatacagctggtttccataggcggcaacccaatctggatgttttcttgccgggtgatcctcagacaatttattaagatctgtatgattcattgtaatacggtaaggattaaaccacgcgtgaaattccaaatttcgtttatgggtttcttcaatcataaatgcaagaggatcatagccggggtccttcccttggacaccggttaagtattccgaccaaggcccgtaagctgacggataaaaggcatcagccgtcggtttaatctgaacgataacggcattcattcccattttttgcacatcgtccagcagtttgatatactcctgtttttgctctttcacagataacccttttttggacggccaatcaatatttaatacggaagcaatccatacggctctcagctctctgtcagactgcgcattggccataaacggaacggaaatgacaaacgttccgatgatcaagctgacaaggaaacggataatcgacttttggcaaaccttcattctgtttcttctcccccattacatcactttcactcgctattacggtattcccgggctataaaagggtgattaacagaatgtctatctcactaaataaacgaaaaaagtcctaaagcatgttgtgggccgcttttaggactttttatcattcatcatggtttgcaaactttttaacacgtcaataagttttacgccgacaccgacagccgtttcaaggatcgcttgtgctccggcaatggctaaaataaagatcagcggtattgcaatacgaggcaaaaaaagatagccaagtccgatcaagatggcacaccaaacaccggcacaccagtagcaattgagcatgtatccaaagttagaagccggcacacttttttcatctacatgcccgttttgatcaacaatccttttctttttcataaaaggtttccggataaattctgtgattttgtcgaatacaatcaaatgtgtcagcctgtaactggctagaatcagcatgataaacgtaagaaaagatagatgatccatgacaagcctccaagaaaaaggatgatgttatcattccctagtgtcatcgatccattctttgatacaaaaagaagcggacagagaatgcctctgtccgcgaatccgctctattgtttgtgcgggattgctttatttgaagtgatcttttctaaaatgtcgaggatgatgtcagcattcttttcagcatatgttccttccagcatgtctttatgagcgccaaaacccgtgtactcactatagtttccacaggcgccttcccatttcgttaagcctgtattctcgctggtttctgggtggattccagcttcgatgaaatgaatacttgctttgatgtgcccttcattcagcaattgtgcccaatattcctgatagtttctttttttcttcatcaccttttctctgactgcttcaggcagatatgctgcagattcgtcattaccggtatcgataggcaaaggctgttcttttagataagcgtccacgataatgaagtcgctgacttctaatcctttgcgctccatagcctgtgccacttcaaaagccaggtttccgcctgcagagtagcctaataaaacgtatgggcccttaggctgtatgtccgtcatgcaattaacatattgttcaatgcgggtgtcttgttcaataaagtgaaacccgtatacggctgccttctcattcagcaataaagcaaggtctttaaaataaatgccaaatcccgatatcggcgggaagcagaaaagattttgcgcgccgtgctggttcagtttgatcacatgctgttcatttgctgctgtcagctgtttagaataaagtttttcggcaagctgagcgattgtcggatgttcgaacaagaaatcaatcggtatgtcaatgttctgctgatgttttagtgtatgtatgacttgcagtgcttttagtgaatgtccgccaatagcaaagaagtcatcatcaatactgattgtgttaacaccgaggacttgcttccaaatgttcgccaattcttcttcaaccaagtttcttggcaatatgatgttctgtcgtttggcaggcttattttctggaataggcagcgcgctgcggtctatttttccgtttccggtaagcggcatccgctccacacgcacccagtgctgcgggatcatatagtctggaagcacacgcgccaaatcggcgcgaaaatccgtatctgtttttttgtgatcaccgacgtaatgagtgtacagctgcgcctctccatctttttctctcaatgtcactgctgcttcttgaacgccttccatttctaacaggcgcgcttctatttcggcaggctcaattcgttttccgcggattttcatttgcctgtcaattctgctgatgtattctaagtttccatcaggcagccagcgcgccaaatcaccggtacggtatattctttctccaggcaagaaaggatgaggagaaaacacagcatttgtcaggtcatctttgttcaaatagcctttagcgaccccatcaccgccaacacaaagctcgccgggaacgcctattggcaaaagacgtccttttgtatctaagatgtaagcggtgctattgctgattggttttccaatcggaatcggccccgcatagtctctctttatttcaaaaaaggttgaaaaagtcgtgttttccgtaggcccgtaaatattatgaagcgcgagatctggacaggcgtgtctgacagcattcatcagagcaggagagagtgcttctcctccgacatataacgtatggaggccgcgaaacatgtcagctcgtacctgtgccagctgattaaaaagagctgtcgttaaaaatagcactgtgatgtcattttcaagcaaatacgctccaaaccgatcaggtgtcagcattgtcgatttatcaatgatatgaaggcttgcgccatttaaaagtgccccgaacatttcaaaggtgacggcgtcaaagctgatagatccagtcagaataaaccggtcatcaccggacgcagacgtgtaattgctgtttctgacaagggacacgacattgcgattcgtgatcatgacccctttcggccggcctgttgatcctgaggtatacatgatatatgcaagatcgtctggactggagatggtgttgataggaaaatggttctctcccatcaatgcctgcgcatctgcaatcatacatgttcctgagaacgcagcattttgctccagccccttttgaacaatcagcatttttgcttgcgtttcctcaagcataaagctgactcgttcaggcggaagctcctcatcaagcgggaggtatgctccccctgcttttaatacggcaagcacactgatcatgaattcgggagaatgtgcagccaatattccggctgtctcgtttttccgaaatcccttttgaattaactctctggcgagcgcattagagcgtttatcaagctctttatacgaaatagacatattgccatacacaagtgcggtatggtctggcgtcttttctgcttgttcgcgaaataaatcgataattgtatgtttctttggatactccgtttttgtattgttgaactgtgtgacaatctgctctttttctgttgcatcaagaaaagaaaaatcagcaattggcatatgagggtgctgtgcagctgtgctaagcgcttgcgtaaattgcctcttgatacaactgatccaggcagcatcgtaaacgaatgcattatagctgaacttgatgacaagctcttcgccgggagcaacgacaagattaaagttatatcctgattgctcggatacttgaacttgatcgatttgcagcggtgaatcggtctgatcagcggaatcggcgattttctgctgtaacggatagttttcaaagacgataatgtgatcaatcagttcctgttttaatgcggtgtttgcctgaatatcaaataaaggctggcaggtaaacggctcagcttccagcatttctttctggcatcgtatgaacagttcttgaaacgtttcgtcttgatgtgttttaattcgaatcggtatggtattgataaacaaccctatcatttgctccacgcccgggatttctgacggtcttcctgatacaactgcgccaaacacaacgtcgtctgtgcggttatattgctgcagcatcacaccccagacagcctgaataagggtagcgagcgtgacgccgtgttgtttggcagtctctttcagcttgtctgtcagtggtttatttaatgaaaatatcaaatcttcacggtgataaccttcttttgtttctttatcagacacacgaggcagaggtgatggagtgctgtagttttttaaataggtatcccagtaggccgctgctttttctttgtctcggtttgtcagccaggaaatataggtgctgtacggccggacagggtctaatgaaagcggttttcctgcatgaatcgattgataaatttgcataaattcctgcataacaatacctaggcaccatccgtccattaaaatgtgatggtgactccaaagacagacatgctcatcttcagctgttttgaacagagaaatccgcatcagcatgtctttttgcagatcaaagcctttttgcttgtccttctctttaaagcgttcaatatactcattctggtcgtttgttggcagatgggaaatgtcttcgctgtacaaatggaattcacgttctgtcatcacgacttgccgaggtcccgacaaatgcgggacgtgcggcaaaaacacggttctgaaaatatcatggcggtcgataatggcttgaatgctgcgctgaaaccatttatagctgaggcttcctttaatggtgaagagcgactgctcgacatacgccccctcctctttacggaggaaggaatgaaagagcattccctcctgcatgtgactcagaggataaatgttcttgattttttttatgttatccatagtgtctgcacctttcttcacggtttcattagtgaaaactgagcatatcagcaatctcttgcagggcatcctcggtcagttcttgatcatcataatcgctgatcgttttttctgtttcgcttttgttctggcagtgttcgatcagctgtaataaaaattgacggcatgtttcgctaagctgttcgatggttttgcgctgaaaacgggtagtgtcataagtcatattgacagtcattttcccttctgcagcgattgcactgatatccagcgactgttcacggttccatgttgtgctgatatcacccccggcacccagcggagagaatgagaaggcgtcctcctcaggtacttcagctgtgcggccgctttcaaattgaccaagataattaaagctgatttctggtgcacctgtgaaattgatgtcttttttgccaggcggagtcaaatatttgatgacaccgtagccgaatcctttgtcaggtacacgtctcagtgtatcttttgttgtttttagcacatgaaccatgtattcttccgaatctggcaagtctgcgttcaatttaaccaataacggataaatggcggtaaaccatccaaccgtccggctcacatctattccttctaatacatcctctcgcccgtggccctctaatgatagtttgaaggcggattgattggtccaatggcgcagcgcaagaatgacagaagcgagcagcatgtcctgcgtatcagtgttatatgcgctgttggcgtcttttaagagtgctgctgtctctttctcgtttaaggtaaacgaaatcgtggaccgttgtccctcgtgtgctctagttccatcaatgtgatcaaaaggcaatgcctctgtttgatactcttcggcttcgcgccaatacttgagctgtttcatgagctgctggctttcagcgtagtcagagagctttttcgtatacgctttaaatgagcttgttttaggcggcagtttgataaccttcccgtctgcagcttggcgataccctaaagccaaatcttcaagcagaacccgccatgaaatgccgtcaacgacgaggtgatgagcagataaaaataagaaatcaccgtcaattgtgtggaaaagaccggcttgcagcagcggaccattcttcaaatccattttctgctgaatatcaagtacatgacgtttgataataggctcatacgctctatttccatcagtgcataaatcaatcatctcaaggccgtacaacgcgtcgtccgaatgactgagcggccgattatattgatcccactttccttgttcattctgtgtaaacaccattcgcagcgcatcatgatgacacgttattgcttttaacgttttgcgcagtgcgtcttcttgtacaaaggtacttcgatgcagcattacggactgattaaaatggtgtttttcttttatatcttgagaaagaaaccatttttgaacaggcgaccattgtacgtctccctcaaccgcagcttggctggaacttgtatctgaatcacggatataagctgccaattcttgaatggtcggatggctaaacaaatctttcactgccatttgcttgcctatccggtgaagccgcgcagatacctgtaacgctttgattgaatctccgccaagttcaaagaacgaatcagctgttccgatcttttctgcccccagtacttcttgccatatatctgccagtatttgttccattttgctggctggcgggaggaatggacgttcaccttcgtggttatatacaggttttggaagtgctccgcgatccagcttgccgtttggtgacaatggaagtgagtccagtttttcaataaacgcagggtgcataaacaccggcagcttgttttgtaattctgagcgtacagcatttgtgctcaactctggttttgtcaccacataagcacttaattcggtttgtcctgacgctgtttcatgagcaactactgcggcgtcttttacaccatttatacaccggatgaccgattcaatttctttcgtttctacacggtatcctctgattttgacttgatcatcgattcttccgagatattcgagtgttccgtcggccatccatctggcggcgtctcctgttcggtacattcgtgtttcgggtttaaatggattctgcgtgaatgctctctctgtcagttctggaagattaacgtaccctcttgcaagccctgttcctgctatacaaagctctcccgcaacaccgattggctgaagctgatgattgctatttaaaatcagcacttgagtcccgtcaatcggctggccgatgcttacgtatgcctgcttttccatatgtctcatgacggtagtcgccacgctgttttctgtcggtccatattcgttggcgagttcggtatgcggacatatagctaagctgcggtcgatcaattcgcggtcagccgcttctcccgccagtgtgacgactctaagtgtctttacatcttccggctgcactatgtccaaaagcgctcgatataaaacaggcacaataatcatatgtgtaatccgttgacgagacagctgatgcttaatgaccagaatatccttcgcttcctcttcatgaagcaaaacggcttttgcacctgacaaaagcggtgtaaacatactcgttataaagccgtcaaatgagaaagaaaagagctgcagaatggtatctgtctcgttgaatgcataagcgtttcgccgccactgaagagtgttggcaatacctttatgctcgaccattaccccttttggacggcccgtcgttccagaggtataaatgatataagccaaatgatgagcagacgatacttgcggcagcggtgatttgtcgtatgcctctacactttctatcgctaagaactctccttcaaagtcagcaagtgcttcccgatccgcttcatttattgtcatcagcagtttcgttccgctgtcgctaaggatatagcgtttccgttctgtcgggtattcaggatcgatgggaacgtaacagcctccggctttccacacaccaagtatggatgctatcatactgaacgaacgatgcatcatgatgcctactggtgtgtccggcttaacacctcggctgcgcaatgcacgtgcgattccattggaccactcgtcaagctcctgataagtgagtgttttgtctccgctgacaagtgcagaagcttttggtgttcgtgcagcttgctgctcaaacaattgactgattgtttgaactccgtattgattcgcttgcccggtgttaaactcattaagcagctggtgccgctcttcttgggtcaggatgtcgatatggttgagtgtcacctccgggtttttgccgatgatgctaagtacatttgttaaatgcgatacccagcgttcaatggtggttttctcgaacaatgcggttgaatattcaaaaaggaaatgaatgtttccgtcgccctcagatgcctgtagtgtcaaatcgaatttagaaacgagatgagaaacttgtgccggcttcattttcaaatcatgaagatacaatggctcgtaatcattattttgaacaactaacatcgcatcaaacactgggttccggctcatatctcgtgtcaatccaagcttatcgacaagctcttcgaacgggtaatcttggtgctcaaaggcttccaatgctgtctcacgcacttcctgcaaatactgtacgaatggcttcccgccctccgggcgtgtccgaagcgccagcgtgttcacaaacatgccgagtatcggctcaagatccttgtgcggccggccggcgattggcgagccgacgatgatatcctcctgtccgcttaagcgtgacaagaacgcggtgtaagccgcaaggagcaccatgtacagtgtgcttccgttttctcgtgccagcttgtgaaggcctgatgcaacctcttgatccagcgtaaatgagaccttgtcaccagcgaagcttcgcaccggcgggcgggcatgatcagcggggagatccagcacaggcagctcgccctcgagctgcttcagccagtacgcctcttgcgttttgtacgcgtctcctgttttgaatccttcttgccatacggcataatctttatattgaatgcgcagcgccggaagcttccgattattgtacagctcgccgaattcttgaatcagaatgttgacggaaacaccgtctgaaatgatgtgatgcatatcaaccagcaacaggtgccgctcatctgatacctttacgatttgggcacggaacagcggcgcttggctgagatcaaacggtttgataaatgcggctgcggcctcctgttcggttcgttcgccgagaactgtagtctgtaacgtaaacggcacctcgtcatggatgcgctgcaccggatcgcctccttcgtcctgttcgaaggcggttcgaagcgactcgtggcgcttgatcagctcttggaaagctctgtccatcctttcagggttgagcttcccttcgagctctaacacagccggcatattgtagcctgtccctccgtcttccagctgctgaaggacataaatccgcttttgggcagaggaaaccggataggtttcctgtttttcagcgggcttaatcgcttcatatggactgtccgttccttcacggataacggtagccagtccttctaccgtcggatgggcaaacacatcttttagcggcacctgtacatcgaattctttggtgatccgtgagacaagcgccgttgcttttaaggaatgtcccccgcggtcaaaaaagttgtcgtgaatcccgacagggccatttttcagcacgtcctcccacagctgagaaagcttcatctcagtcacgtttctcggcgctgtgtaggtctccgcatctgccgctccgccaggagctggcagggcgtttcggtcgagctttccgcttggcgtaaccggccactgtttcatttctatcatataggctgggaccatgtagcccggcaacagtctctcaagctgtgcacgcacttcgtttctttggagcccttctatataagcgcataattccggctccccgctgtctgtccgtacggtaacagccgcctctcttacaccttctatatttcttagtgccgcttcaatttctcccggctcaatccggtagccgcggatttttacctgatcatccgtgcgcccgaggaattcaacattcccgtcagggagccagcgcgccacatccccggttttgtacatgcgttcccccgggtaaaacgggtcttcaagaaaacgctcctccgttaatgccggccgattcaaataacctctggcaacacccgctccggcaatgtatagttcaccgatacatccaacaggcagcatccgctgattctgattcaggatatacaatctgacatgatgaacaggttttccaattggaatccgttcaagtttttcttgcggcggacaatcaaagaatgcagcttctacggttgcttccgttggcccataggaattggttattgaaacatttggaagcaacacgtgaaatcgggagacaagatgggtctccagctgttctcccccagaaaacactcgcttgagtctgtttgtcttaatcggtacagagcgatattttatatgttctaaaaatgcatggagcattgaaggcacaaaatgcatagctgtgatcttttgttcttctatggccttcgcgatcacttcaggttctttttcgcctccctgaggaagcagataaacagaagctccggcataaggccagcaaaacagctcccatattgaagcatcgaatgaatatgatgttttgtgcataatcatatctgaatgctttagctgatagcgggactgtagggaattcaaaaaattcaccgctgatcgatgttcaatttcaacacccttaggcatcccggtagaaccggatgtatagatgacataggctaaagattgcgggagaacatccacattcggattggacaaacgatgtgccagtccgctatttgtctgattgagatagacaatctctcctgcaaatgccggaacatgaagaccggaagactgaagcaggagaatgtttgtaccgctgtccttcagcagaaagctgattcgttcttccggataatccgggtcaatgggcagataagcgccgccagctttaagaatgccataaatgccgatcagcatttcaggcgaacgccggcctataatggcaacagtcgtttcagattttactcctcgtccgatcagctcccaggcgatacggttagcctgttcgttcaattctttataggtcatcactccatcttcgaagataacggccgcctgatcaggcgtttttgctgcctgctgttcgagtgcatagtgtagcgtttgattcattgaatagcccgtctcctcaaacagatggcatgattcaatgaaatctctctcttcttcttttgttaagattggaatatcgtccaattctgtttcaggactggcagctgtatgttccacaagcgtggtgaaaaggctggcccacctttggatggtttctttctcaaacaaagctgtactgtattcaaactgacagaaaagctcggaatcatgctctgtaacgtatagggaaatatcaaattttgatattgggtgctccaagtcgttccactgaagctgtatatcattcatttttagcttttgctgttccatattctgaaggactagcgttgtgtcaaacaaaggattccggctcatttcccgctgcacaccgagtttgtccacaagctcttcaaacgggtaatcctgatgctcatacgcttctaatgccgtctgtctgacttctttcagaaattcctcaaatgtcttattacccgctgggcgtgtgcggagagccagtgtattgacgaacatcccaagaacagcttcaaggtcggcatggggccgtccggcgattggtgaaccaatcacgatatcatcctgaccgcttaaccgagacaaaaaggctgaatacaaagcgagaagcgtcatataaagcgtgcttctgtttttatgggcgagccgctttatgcgggccgtgatctctttgtccaattgaaaggttacttttccgcctatgaattgccgttctgccggacgtcgtttatctgttggaagctccagtataggaagatctccgctaaactgctgctgccagtaagtctcctgcttttggtacgagtctccctttttaaatttctgctgccatacggcgtaatctttatattggatccgcaatggcttaagctgccggtttgcataaagatcggtaaattctcggattaggagctgaacggatacgccatctgaaatgatatggtgcatatccaccagcaatacatgcttctcgtttgacacttctataaggcctgctctaaataatggcgcctggctgagatcaaagggacggacaaatccctcgatagtggtctctttacttaacgtaaacggcacttcggtgtggatacgctgaaccggctcgtcatcagctccaggtacaaaggaagttcgaagcggctcatgccgactgatcagttctttacatacagcagacagtttggcgacatccagtgcaccttccagttctaagaccgcaggcatgttataggcgacaccctcatcaagctgttgaagcacatagattcgtttttgggccgaagatacaggatatgtatcccttttttctgctggttcaattgctgcatacagattttgttctgcctctcgaataattaaagctaatccttcaacagtcggatgagcaaagatgtccttaagtgaaacttgcacatggaattcctttgcgatccgtgacataagcactgttgcttttaacgagtgaccgccattgtcaaaaaagttgtcttggatgcctatatgcccattctttagcacatcttcaaatagttgcgaaagctttgcctctaacagatttcgaggggcagtatatgggtttccgctgattgaagcatctggctccggaagtgctgcgcgatctacttttccgtttggggtaagaggtatgctgtcaacccatatccatttcgccggaatcatgtattctgggagctcactagccatataactgcgtaaatctattgcattcagcttttgtacactgcaatagtaagcgcataattcatgttcaccgttttgatcttgccagatgagaatggcagcctcactaatgtccggatgattcattagcgtgacttcgatttcttgcggctcaattcgataacctctgattttcacttgattgtctgcccgtccgatatattcgatgttgccgtcttcaagccgtctggccaaatcacctgtccggtacatgatcacatcaggcttgaatggatcggatgaaaatttgtcgcttgtcagtttatcgtgattgacatatcctctggcaacacttgcgccggaaatatagagttcgcctggtacgccgcatggctgaagctgtttttgatgattcaaaatatatagatcagtacagcctatcggtttaccgattggcggaagctcaggaatagggtctccaggatgaatggtatacgtagataccacatgagtttctgaaggtccgtaatgattgtgcaggtgtatgccgcgttcacacaacacatcttggaaaaggtctgaaatcattaattgttccccggctgcgatcaggtgtttgacgccatcaggaaacgagttcgcaagttctcgctcgctgaaaatcattttgataaaagcagttgggagaaacacaatattcgtctgatgcttgtttataaatgcaaacagctgaggcacatctctttttatggcttctggcacgatgtggagtgtgccgcctttcagaagcgcagaaaatatttcttgatagcagacgtcgaaggaaggtgtcgcaaattgcagaacatctgcttcaaagtcaatgccggagtgagtatattcgaacttcagcaagttagccatgtttcgatgctcaaattgaacaccctttggtttacctgttgtgcctgatgtataaatcatatacagcagatcgtcagcattgttgactgactttatgttactgccgtctactttgctttcgatatcttctggatgagtgataatgtaattgtcttctaacgatgaggaaagatgcgcttgtgaaacaacatgcgaacagccgcaatcatgcagaatataacggattctgtcagccgggtaatgcggatcaaccggaacaatggcgccgcctgctttcaagataccaagaacacctgtgataaacgccgctgagcgttccatcataatcgcaacgggttcctgtctcacaacgcctttcattcgtaaatgccgtgccaatctgttagccgctttattcagttctctgtatgttaatgagcaggcttgatcaattacagcatgagcatctggtgtcttttccgcttgcttttcaaacatggcatggatggtttcgtaaactggtgttcgatctgtgatttctccaatcagctgccgcttttcagtatctgtcgtgatatcgatttcttcaggtggaagattcggattatttaagatttgtgatacagcattcagaagatgctctttgacagagagcacaaaagaccgatcgtgctgctccgcatcatagttcattttgatatgaatttcttcccctggcgccaccataagataaaagctgtagttggtttcatctgcgacagtgaaattatgaatctgaaaaagatcagaagcatgttcctgtttgttcagcatttgaatctcttgctgcaccggatagttttcaaatacgagaatatgatcaatcagcccttgtttaacagctgagcgggattgaatctcatataaagggtggtagctgtacgcttcagcggcaagacggtctttttgcatatcttttataagttgaagaaatggcgtttttgccccctgcacccgaaccggcatcgtattaatgaaaagacctaccatatgttcaatgccttcgatttctgcgggtcttcctgaaatgacagaaccgaatacggcgtcatcgttattattatatttttgtagcagaatgccccaaatggtatgaaaaatcgtactgagtgtcacttcttctcttgcagcaagctctgaaagtctgctgctttcttccttagagaatgaaaatgtaacgtgttcctgcctgctttttccctttgtttttttctgcttcgggagcacggtttgctgttcgtggccggaaagataatggtcccaataagaaaccgcctgctctttgtcttgctccatcagccatttgatatactttccgtatggctggaccggctccaatgttataggggatgcatttacataagatgcgtaaatatgcagaaactcctttagcacaatgctgaggcaccaaccgtccatcatgatatgatgaaaggtccaaatgcaagagtactggctctctcctgtttgaataagagcgatgcgcatgagcacatccttttgcaaatgaaacccccggtcccggtccttttctttccattgctcgataaactgtgattgctccgcctcgtttaaatgagtaatgtcttcttccagcacgatgacatttcgttctctcagaacaacctgctggggggaggaaacattttggctgataaaaatcgttctgaaaatatcatgtctttctacaagagcgttgatgctgttttgaaaaaactgcgggttgacttttccttctattgtaaaagaagcttgctcaacatacgcctgtgaatctttttgcaggagggaatggaaaagcatcccttcctgcatgtaagacagcggataaatatcctgaattgaattcgcttttgtcatgttcatgtctccctgtcacgattttctacaattcttccaccaagctggatatgctgtccaagtcctctgccgttaatgattgactgctgaaatcgctcagtgtcttttctgctttctgttgaccggcgcagtgtttcataatgtccagcaaaaagtgttcaatcctgttaataagctgctccattgtgtttctgtgaaagcgggctggcggataactaagattgaaatggagctttttgtctgctgccattgcactcatctcgatgatttgctcacgcttccatgtatgagtgatatcctttccgctaccaaggcttgatgggcggaaggtgtcctgtctttcgatgtcgttgaactggcccaaatagttaaagctgatttcaggtgtttttgaaaacgtaatgcttttattttcagggtgtgtaaggtatttcagcataccgtaacctacccctttgtttggtatccggcccagtgtatctttaacggtttttactgaggttccgagctcatccctatgattttcaaagcttatgagggccgggtacatggatgtaaaccagcctaccgtcctgctgatatctaactctggcagaatgtgttctctcccgtgtccttccatagcgatacggagcttgcttcctcctgtccattcacaaatcgccaaggatgctgcggttaacagaatatcttgtgtatctgtgccataggcgtgattgacgttttgcagcaagacggcggtgtctgcttcagtcagtgaaaagcttaatgagtcccttttgctggtgtccatgttcagatgctgcggtatttcgtatggcagttctgcggcttgctgttcttctatacttcgccaatacgcctcttcgcgaatcagcttactgctttgggcatattcctgtatgcgtcttgcgtattcctggtaggaatccgttttaggcggaagctggatcgtctggcctgcagcagcttgttgatatccggctgacaaatcctcaagcaaaatccgccatgagacaccatcaacgacaaggtgatggatcgcaaggaacaagtaatctccgatcagtgttttaaacaaagcggcgtgcaacaatggtccttcctgcaaattgatgctttgctgaagatctgcaacttcttgtttgatttgcgtctcccagccgctttctgactgtgaaagatcagaggttcttaagctgtatagctgtgactcatgaatgccttggttgatttgaatccatcgcctatcatcgttgcgataaaccatccgaagcgcatcatgatgctccgccagttttttcaaggctggtctaagggcgttttcagacaaacgtccagaatggaatagcatgacagactgattgaaatggtgtctttcttcaatatcttgtgaaaaaaaccattgctgaacaggcgtccaaggaacgtctccctgaatgggtccttgctctatgattctctctgacttacggataaatggtgataagtcctttatctttggatgacggaataaatcacttacctgcaagcttagcccatagcgcccaaggcgtgcagaaacttgaagcgctttgattgaatctccgcccaattcaaaaaacgaatcctctattccgatcctctggatgccgagaacctcctgccagatcaacacaagttggtcttcaaggtcatttcgaggcggagcgtacgtttgtttagatgtgaaatttggttcaggaagtgcttttcggttcaatttgccgtttgatgtgagcggaagagtctccatttcaataatgtacgccgggatcatatagtttggcagcgaacgcgcgagaagtgaacgcacttgttcagcattcgtgcctgcttttacgctgatatagccaaacagctctttgctcccggtctgggctgtacgtgctaacactgcggcttctttgaccccgtctatttgacgaagtgctgattcgatctcacccagctccacacgatagcctctgacttttacttgatcatcaatacggccaacgtactcaattgtgccgtcaggaagccagcgcgccagatcacctgtgcgatacagtcgatcgccaggtgcaaatggatgtgggacaaatttctctttcgttaaatcaggacggcccaaatatcctctggcgacgccatctccgccgacacaaagttcaccgacagctccgaccggctgcagcactccccattgatttaagatataagcggtggaattaccaaccggccgcccgatcggaatggaaagttcatatgttttttgaatgtgaaggcatgtcgaaaaagttgtattttcggtagggccatatccattccatatagatacttcagggcagacatttctgattcgattgacgtggctcggcgacaaagcttctccgccaataatcaaatgtttcagctgtgaaaatgtttgttcattttgttctgtcaaatgattgaatagagaagatgtcagccaaatcgttgtgattccttgatgttctatgtacctcttaagctgatgggaatcgagaaatgtttgttgatcggacagatgcaaagcggcaccatttagcagcggtccgaaaatttcaaatgacccaacgtcgaaacctattgatgatgtcatcagaaggcggtcttcaggtgtaaatgtaatataattgctgtttttaacaagacgaattacacttcgctgctcaatcatgacaccctttggtttaccggttgatccagaggtataaatgatatatgcgagtgaatgtggccctgctgaagaatcaacgttcttcgtttttccttgcttttgaatatcttcgattatgatttgttcacattcaatgtctaatagctgtttttctgttttttcagattgaaggagtaatgccgccccgctgtctgacagcatataagctattcgttcaacaggcagatcagaagcaataggcagataggctcccccggctttcagaatgcctagcattcctgcaatgagttctggtgttctgcctgtcaacaaggctacaacactatcaggccctacgcccttaatctgtagaactgaggcaatttgatttgcccagctgttcaggtcctcgtaagtaaatacttgggtgtcgctgacaattgctacagcattaggcgtttgttcagcctgcatttcaaagagtctgctgatggtttcatttcttggataatctatttttgtgcgattgagctcgtggataaggtaatgggtctcatcctcattcaggatatttattgttccgagagcggctttgttgtctttgaagatggagagtaacatattgatgaagtattgaagccacttttctatcgtttttttcttatataagtcagtactaaactccatttggaacgtcagcaaaccgtggggctgttcctgggcatatagggttaaatcaaatttggacgtttgatgcccattgtttgctgcaggtttgagacaaagttcatccagctccaacgattcctgatccatgttttgaagaacaaacattacgtcaaacagcggatttctgctcatatcccgtgtcaattcaagcttatcaacaagctcttcgaacgggtaatcttggtgctcaaaggcttccaatgctgtctcacgcacttcctgcaaatactgtacgaatggcttcccgccctccgggcgtgtccgaagcgccagcgtgttcacaaacattccgagtatcggctcaagatccttgtgcggccggccggcaattggcgagccgacgatgatatcttcctgtccgcttaagcgtgacaagaacgcggtgtaagccgcaaggagcaccatgtacagtgtgcttccgttttctcgtgccagcttgtgaaggcctgatgcaacctcttgatccagcgtaaatgagaccttgtcacccgcgaagcttcgcaccggcgggcgggcatgatcagccggaagatccagcacaggcagctcgccctcgagctgcttcagccagtacgcctcttgcgttttgtacgcgtctcctgttttgaatccttcttgccatacggcataatctttatattgaatgcgcagtgccggaagattccgattattgtacagctcgccgaattcccgaatcagaatgttgacggaaacaccgtctgaaatgatgtgatgcatatcaaccagcaacaggtgccgctcatctgatatctttacgatttgggcacggaacagcggcgcttggctgagatcaaacggtttgataaatgcggctgcggcctcctgttcggttcgttcgccgagaactgtagtctgtaacgtaaacggcacctcgtcatggatgcgctgcaccggatcgcctcctgcgtcctgttcgaaggaggtacgaagcgactcgtggcgcttgatcagctctttgaaagctctgtccatcctttcaggggtgagcttcccttcgagctctaacacagccggcatattgtagcctgtccctctgtcctccagctgctgaaggacataaatccgcttttgggcagaggaaaccggataggtttcctgtttttcagcgggcttaatcgcttcatatggactgtccgttccttcacggataacggtagccagtccttctactgtcggatgggcaaacacatcttttagcggcacctgtacatcgaattctttggcgatccgtgagacaagcgccgttgcttttaaggaatggcccccgcggtcaaaaaagttgtcgtgaatcccgacagggccatttttcagcacgtcctcccacagctgagaaagcttcatctcagtcacgtttctcggcgctgtgtaggtctccgcatctgccgctccgtcaggagctggcagggcgtttcggtcgagctttccgcttggcgtaacaggccactgttccatttctatcatataggctgggaccatgtagcccggcaacaggctctcaagctgcgctcggacttcgtttctttggagcccttctacataagcgcataattccggctcgccgctgtctgtccgtacggtaacggccgcctcccttacgccttctatgcttcttagtgccgcttcaatctctcccggctcaatccggtagccgcggattttcacctgatcatccgtgcgcccgaggaattcaacattcccgtcagggagccagcgcgccacgtctcctgttttgtacatgcgttcccccgggtaaaacgggtcctcaagaaaacgctcctccgttaatgccggccgattcaaataacctctggcaacacccgctccggcaatgtatagttcgccggcgacaccggaaggctgtacggctaaatgcggatctaaaacatacaaacgcgcaccaggtacgggcttcccaatcggaatccgcaaacggtctctgtcccgttctggatccaatacgtaaaatgccgcgtctaccgttgcttctgtcggcccgtagccatggattaatgatacctgcggcaatacagaagcaaaacgggctgccgtacgcggcgcaagcggttcacctccggcgaatacacgctttaggtttgtcccgtcaccaagcgctaacatttctgcttgatccagaaagctattcagcatagccggaataaaatgagccgttgtcactttttcctgatgaatggcttttacgatcaatgcggagtctttttcccagccgggcggaagcagatacgccgaagcaccggaaagagcccaccaaaacagctgccacacagacgcatcaaaggaaaaagaggttttcaccatgacaatgtcatcttctgaaagcggaaactggtgctgcatgccggtcagaaaggaaacagcctggcggtgctcaacggccactcctttcggctgcccggtagaccccgatgtatagatgacataggcgagagaaccgccgtcagcaggagtaaacagatggttttctgctttttcgctcgcaagagatgtcatatccacttcaagcgtttcgccagaaaagttcggtgcggagcatcccggctgtgtcagcaagagcgatgccccgctgtctttcagcatgtagctcagccgctcctccggatacgcaggatcaagcggcaaatacgccccgccggccttcagtacagcaaggacagcgatcagcatgtcaggtgagcgttcagacaggatcccgacgatactttcgtttgtgacgccgcgtgccgcaaggtgagcagccagccggctggcgtacatatcaagctcagcgtatgtcagcgaaccgcctgaaaagcgaatcgctggccgctccggtgtgactgccgcctgtcgttcaaacagcccatgcaaggttggggcttcaggtgaaacagatactgtcctgttattttgagaaacgattttccgtgttttgtcctcatctagcaatgtcatctttgacacaggaagagatggatcagagatgacgtcagagatcatgtgctgtaaataatcttttatttcggacatcatatttggttgataagtgcctgtatgaaaatgaatccgaacgtacaaagtacgccctgggatcactttgacactgcatctataattagttacctcttccatctcaaaatctttcacggagaaatcaaatgatccagcttgattcagctcttcaatctcttgttgagtaggtgtattttcaaagacgataatatgatcaatcagctcttgtttaagagcgctctgcgcctgaatgtcatataaagggaagtaactatacgcttctgcttcagtcatgtccttttgcattccgctgactaggtcagaaaaagacagaaaatcactttggactcgaataggaatggtattgataaaaagtccgaccatgttttccacatcttttagctcagaaggtctgcctgatataactgatccgaatacagcatcgtcgcgacgattgaacttttggagcatgattccccataaagcttggaaaacagtgttaagtgtcgcaccacatgctgcagcgattttctgtaattcggaggtttctttttcaggaatggtaaacgtgatctgctgtaatgtcccatccgacatttgatctgttcttttaggcagaggtgaagctttttcgaaatgctgaagcctctttttccaatactcagctgcttcttcccggtcttgctgcatcagccatttaatatacgtcccgtacggctgtacgggaggcaaatcaggaaactgcccttttccaagcgcttgataaatatggagaaagtctttaatgacgatgcctaaacaccagccatccattaaaatatgatggtggctccagatacagacataatgatcaggcgcccattttaaaatagatattctcatcagtacatccgtttggagatcaaagccttttgatttatcctgttctttgaatgcctctgtacaatgttctttatctttttcattgagatgagaaatatcttcaacatgaatatggcaatgacgttgcttgagcacgacttgacgaggtttggctacatttttatagatgaatgctgttcgaaagatatcgtacctgtcaaaaacagcatccatacttttctggaaacgctccaagtcgagctgtccattgatcgtaaaagaagcctgttcaaaataagctctcgactgttcatcatacaatgagtgaaaaagcatcccttcctgcataaatgacaaagggtatatatcctgtatttcaggttgctgcggcatcagtgaatctcctctcctatagtttgttgacggctcccatgatctcactcaattcatcaagcgttaagtcttcatcagtgaaatcagatgcgctccactctcggttttctttgccggtacaatgctcaatgatgttttccagagtctgtttaaaatgcctggaaaatgtttggattgttttttcctcaaattgaaccctgttatagatgatgtgcatgttcaggcaccccgaagaaacggcgccgctgatatccagtgcataaggacgctcccagttcgggctgatctcatttcctggcttgatgtcagacacctcaaaggcatttgattgaatatcctgatcaaactggcctaaataattaaagctgatttctgggctgtttttctgagagccccatcttttgctgatatatttcagcacgccgtagcccgcgcctttatgcggtatacggtgcagcatatcttttgtctgtttaataaggtggcccagccgctcttctttgtccttatgatcggaatctctcatatcaagccacacaggataaatggaggtgaaccagccaacagttctgctaatatcgatgtcctcaagatatgattcccttccatggccctccatgctgattttaaattggttatttcccgtccatttctgcaaagcaaaacctaaagctgtcagaaggatatcattcatctccgtgctgtaagctttatgtgcagccgttaatagtaattctgtgtgatggcgagatagctcaaaatcaatcacttctgtatctatgaatgtgttagatgctgcgtcattgtcttttggaataggctggatgtgacggttctcgcactcatcccagtacgctgcttctcgctgcacctggcggcttttagagtagtcagctattctttgtgaatacgttaaatatgaatctgtttttttcggcaatttaatagattctcctgagactgcctgtttgtaagcagctgaaaaatcctcgaacaaaatgcgccaggaaaccgcatcaacaactaagtgatgaatcgtcagaaataaatggtcaccattctcggttctaaacaatccagcatgaagcaaggggccggtttccaaacgaatatgttcttgcatccggctggctgcttcctcaatcgtgtaccgtgcttctgttaggctatcctttacatcaaacagttcaagtgcatatagctcctcatctgaaagatctatccctctgtttatctgcacctgcctgccatcttcatgccggcatacgattctcagtgcatcatgatgagtcacaaggctttttagtacttttctaagcgcagcctcatcaaatcgttcagcccggtagatcataacggactggttaaaatgatggctttccagagattgcgagaaaaaccactgctggataggtgtccaagtaatctcgccttcgaccgggccttggtcaatggcgcgtacgtcttttcgaacccgggcggacagttcaccaagagtctgatgttcaaacatctcacgtactgtcgtttcaaatccgcgctgcttcagtctggcacaaacctgcagcgctttaatagagtctccgccaagctcaaagaaattggcgcttacacccagctcatctacattaagaagctcctcccaaatttcagccatgaccgtttcaatctcatttctaggactgatatcatcagatgtataagcgtgtttttcaggctcaggcagggctttctgatcgagctttccattaacagtcaccgggatgctgtcaatttgtatcatacgggcaggcagcataaagtcaggcaaggcgttttttaggtaagcccggatgtctgatatattcgcagcctgttgatcttttatcaccatgtaagcatatatagctgtttgcccttgctcgtctgctctggtaatgacagccgcctctttaatcattggatactgaagaagtgccgcttggatttcgcctaactcaatacggtgccctctgactttcacctgctcatcaatgcggcctaagtattccagctcgccatttgacaggcgcttagcaagatctcctgttcggtataatctgtctcccggaagataaggattggatacaaaacggtcagcggtcagctcatctctgttgagatatccccgtgccacaccttcgccgcctatatacagctcccctggaactccgatcggctgaagattcatatgagcatccatcacataagcctgcagagttgaaagcggccgtccgatattgcttttattttttacaatgtctgctgcggacaattttttgaatgttacatggaccgttgtttctgtaataccgtacatattaatcaaatcagtatgaggatattttttattccagctttgaagcatgccgggctgtaaggcttcgccgccaaaaatcacgtagcggatgtttaaatgatctgtatgattttgatcttcaagcatcaagctgtaaaaagcagtcggggtctgattgagtacagtgacgcgctctttttttaacaataaacggaatgcatgggggtcacgggctgtttctttagagaccacgactaatgtacctccgttcaataacgcaccgaacatctcccatacagagaaatcaaagcaataagaatgaaataacgtccagatgtcttcatggttaaattcaaaaggcaggttttgatgcttcaagagactgatcacattgcggtgctcgacaatgactccctttggctggccagtcgttccagatgtgtatatcacgtatgcgggctgatctgttactatttcttgaatgtttgcatcagccggaattgagttgttttcacattcatcgatatacaaaatatgcccggtgtagtctgcaggtttgttttgaccgcgctctgtcagcagcagttttgctccgctgtcattaagcataaagctaatacgctccttgggatattcaggatcaatcggcaaataggccccgccagcttttaaaatcgataaaacgccaatgatcatatcaggtgaccgatcgagcatcagaccgacgatatcgccagttcttaccccttgtttgatcagcatagcagctgcccgctcggctttttcattcaggtctcgatacgtaagctgagaatggccgcacaccactgcgatatgctccggatatttagcggcttgcttttcaaataagcttactatgttttcatttctcggataagccgcatactgtcccattttttcaaggagcaacctacgctctgcagcaggaagcaattgcatgtccgaaattctcatctcggtatccgccgttacccctttcaccaattcaataaaataggatgcccactgcgtaatggtttcttcttcaaaaagagcagtgctgtattcaaaacggcagcgtatcccactaggatgctcctcagcgtgtaatgttaaatcgaatttagatatatcatgtttaggagtgacagacgaaatcgacagaccaggcacttcgaaccggaaatcttcactgctttgaagcacaagcatcgcatcgaacagcgggttgcgatttacctctcgatttgtatcgagcttatctgccagctcctcaaaaggataatcctgatgctcgtaagcggtcagagccaggtggcgaatgtcctgcaaataggagctgaacgttttgtggccctcgggcttgctgcgcatcgccaatgtattgacgaacatcccaatgacgcgctccagatcagcgtgcggtcttccggcagcaggcgaaccgacaacaatatcctcttgtccgcttagcttagataacaaaatagaatagacagccagaagaatcatatataatgttgttcccgtttcagccattaaacggtgcagctcatcagccatgtctttatcaatgttgacttcaattgttccaccgctgaaatcagggagacgcggccttgttttatcaagcggtaattctagtgtaggaagactcccgccaagctgaccgagccagtaggcctcctgttttttgtatagctcttttgggtgcttctcttgctgccaaacagcaaaatccttataatgcaggtttaaagctggcaactcttttccgcgatataagtcagtaaattcttggacaagagtgctcatcgagacaccgtcggcaataatatggtgcatatcgagcagcaaaaagccgcggtgattgccgattgtaatgacacatgctctaaaaagcggaccggatgatagatcaaacggtttgataaaggtctcgattgcagactcaagcatttgttctgattccatttcaagctcttttagatcaaaagctatctctggataaatgatctgcacaggctcgtctctgtcaagcacaaaaacagtccgtaatgcttcatgccgattcacaagttctgtgagaacgcttctcaaccgctggcggttcagatttccgcgtaattcaagtacagctggcatgttataacctgtgctggcatctgccagctgatgaagagcatataatcgtttttgcgagaaagacagcggatagacatctctttgatccgcaggttcaatctgtgtaaaagcgtgttcttttaagctcatcaatttgaccgccatgctttcaaccgtcggatatgaaaacacctcactgagcggcagctcgacattaagctttttatgtattcttgataccagtgcggccgcttttaaggactgtccgcctaactgaaagaaatcatcacgaatgccgatgtgctgtttattcagcacatcttcccaaatatgtgcgagatcagcttcgattaaggttcggggcgccatatatgtgacactcgtattgttttctggttcaggaagcgcaaacctgtcaagcttgccgctggatgttaatggcatccggctgatgttgataatacttgctgggatcatataggacggcaatgtcccggcaagatgctgatacaaatctgggaggctgtttcccttttccggaacgatataagcaacgagctccttttcctcagcagaaacatcacgggccagtaccgctgcttcttttacccccggtgcttgtcgaagaactgtttcaatctctctcagttcaatacgataacccctaattttcacttgatcatcaaaacgtccaatatattcaatcgttccatcaggcaaaaagcggcctgcatcacctgttcggtataaacgctccccttcaaggaatggatgatcggagaatgctttctgtgtcagctcttgctgtttgtagtatcctctcgcaagacccgcgccggaaatacacagttcacccgccgcgccgatcggctgcatttgatttccgtgcaaaacaaatacttttgtgtttctgatcgggtgtccgattgtgatcctctctttttcattcagatgccgcaatattgttgttgccacactgttttctgtgggcccgtattcatttgccagttctgcagaaggacaaatcatttgactcaactcaagcagatcaggcgtgaccgcttcacccgcaaatgtcacaatacgaagactttttgcatcgtcagcagtcatcacttccaataacaccctgtacagggaaggaacaatgatcatgtggctgaccttataacgggctatttttcgcttaagggccagcacatccttcgcttcgtcatctgttgtcagcagtacgcacgcaccggataaaagcggggtaaataagctcgttacacagccgtcaaacacgtacgaaaacaaatggagggatatatcctgttcggtcatgtcatactcttcccgtctccattgcaatgtattggcaataccgtgatgatctactaaaacccctttagggcgccccgtcgttcccgacgtatagatcaagtaggctagatcacctggcggcatatttggagcttctgtttggtaactttctgtatgttctatcgttatcgtatttccttcataggacggagggatcaaggaaataaggtcttcttctatcagcaattgagccgcttgactgtccttcagcaggaaagaaagacgttctgctggaaaatgtggatcaagcggcatataagcgccgcctgctttccaaatcccaagcagagctgcaggcatttccattgaccggcccatcatcacagccacgatatctccagatctaacgcctttttctatcagggcgtgcgcaatctgattggctcttatatttaattggcgataggtccagcaatcgtctcccatttttaatgcagccgcttcaggtgttttgcgggcttgttcctcgaacaattggggtatcgttttgttcacataaggacgctcagtttcgttaaacgattggataacctgttgctcctccggcggcacgatattgatgtcactgacggcaacatcgggatttgtcaaaatgcaatccagtgcttgctttagatgcccctgaatcctcagcatctcctcccgctcgtaaacgtctgcgttgtagctgaatttgatataaaatgattctcccggaacgataacgatattaaagtcgtaattggtttgttccgacattgaaatgtcactcagcttcagagcgccttcgtcattttcactctccacgcttaatgcctgatgaagctgtacagggtaattttcaaaaacaaaaatatgatcgatcaacccttgcttcaatggactatggttttgaatttcataaagcggataatacccatgctgttcagatgataaaatatcctcctgcacggctttgaccagcgaagaaaacgttatgccttccgcagatcggattcgcactggaacagtattgataaacaagccgaccattgattcaatcccgtcaatcgctgacgggcgtcccgaaatgacggagccaaaaacggcatcggcatcatctgcagcattatatcgatggagcagcacgccccaaatactcataaacaacgtgtttaatgtcactccccagttttgggcagcctctgtcagtttctcaaccatttcctgcgctaatgaaaagctgacctggtcggctttataattcccgtctgccgtgcggcgctttattcggggaatagaagcagtattgccgtactccttcaaatattcgctccagtaggcagcggtctcttcttgatcttgttctccgagccattcaatataacggctgtacggcaccgtgctgccaagctgtacaggtgagttatttttgagcgaatcatacatgctgaaaaactctttaagaataatgccgagacaccacccatccatgatgatatggtgatgtgtccagacacatgtatattggctgtctcctctatcaaaaagggcaagacgcattaaaggatctttttgcaaatcaaatcctttttcccgatccttagtcataaaagcatcaatcagcgtctgctgttcttgatcagccaggcgagaaatatcttctctatatactgtcaattcccggtttgataagactacctgctgcggacctgtaagatctggtacttctttaatgaaaatcgttctgaaaatatcatatctagaaacaagaaggtttaagctcttttgaaacgagtcgacgcatagattccctgtgatcgtaaacgaggtctgttcgatatatgctttcgagctgaaatccattaatgaatgaaacagcattccttcctgcatgtgcgataacggataaatatcttgaatttgtgccgattgtgccatcaattccacacaccttttcaaaagttaaagatctttcacgagatcttcgatgctagataatgcagacaacgttaattccttattgctgaaatcgctcaatgttttttcgcgtgcttttttctgcgaacaatgctcaatcgtctcgataagatgcctgtgaaaacgatccataaaacactcaattgagtgtttgctgaacacctgggtgtataccgcttttacttgaagccgtccgtccgtaatgagagcgttaatgtccagctcatactctcgttctctctcacccgctatttcgtaacggggctggtaatatgataattgaaacgtatcagcttctttctcttcgctaaattgaccgagataattaaagctgacctcaggctctttatgccgcagttctcctatgtgtgttaacaatccgtatccagttcctttgttcggtactcttctcagcatatcttttgtcatcttaattcggtatgcgagctgatcctcgaaaggctcgggaatacccatgtctagcagaataggataaatggaagtaaaccatccaactgtccttgaaatatcaatgtttggcacatgcccttctctaccgtgtccctcagtgctgatcacgatttggtcatgcccagtccattcagaaagcgccaatcctaaagccgtaagcaaaagttcgttggcatcagtaccataggcttgctgggtttcaaacagcaatttttcagtccagtctccggatagtacaaacgcggctgcgtcgctattcatttggagtctgtccggcacattttctatgtccttaggaagaaaagcagtgtgagcgtctaaaatcgtttgccaatacgttttctctgaaagcaattgtttactttcagctatttgggtaagaccatcggcgtaggataaataagaatccgtttttggcggtaattggatttctttcttttctaaagcctgttgatatgctgcagctaaatcttcaagcagaattctccaagaaacgccatctatcacaagatgatgaagtgcaatcagcaaatgatccccttctgccgttttaaacaaacctgcttgcagcaaaggccctttttctacattcattttgctttgaatgacggtttcctcagcggcaagtttttcatcaagatgagccctttccagcgatgcttttgtccaatctgaaatataaaggccaaacagttcatgatccttgtgattgattccgcgattaaactgaatgacatggccgttttggtcacgttggaaaatcatgcgaatggcatcatgatgctcgattattttacgcagcgctagatgaagcgcgttagcattgaatcctttttcactgaaaagcatgacggactggttgtaatgatagtgaaaagcatgtacctgtccgaaaaatcttcgctgaatcggggtgagttcagcttcaccttccgcaggtccctggtccgcttgagatgccaatggtgtgatatgtccgcatagttcctgaatcgttgaataacggaataagtcgcgtattgtcatgctccagccttcagctgccagacgtgctgccacttgtaatgctttaattgagtctccgccaagctcaaaaaaggaatcgtgaatgccgactcgtgacatgctcagtacatcttcccatatatacgccatcgttttttgtatgtcgttaactggtgcggtatatggacgcgataacacattatttggagccggcaaggcatttctgtccagctttccgtttagggtcagcggcatgttttctaaaggaatcagatgtgcaggaatcatatacgctggcagctcctttgttaaagcagcacggagagcattcgtattgacgtctgaaggcacaatatatgctgccaaaccagcctgtccatttttatcatgctgaacggcaacagcagcttctctgacaagccccgtttgaagcagaacactttcaatttcttctgtttcaattctgtatccatttatctttacttgataatccattcggccaagaagcctgatcgttccgtttggaagccagcatgctcgatcaccggttctgtacagcctttctccagagacaaatggattttctgtaaatttcatttgcgttaagtcaggtttatgatgatagcctttcgcaacacctgccccgccgatgcacagctcgccggcaacaccgatcggctgaatttgatcagtctggctgagtacgtacatgtgtacattcggcagcgggctgccgattggtacgttatctcccgtacactctccacccatactggtttcatagaaactcgaatcaatggttgcctctgtgacaccatagctattaatgatgcgcatgctttggccaaagcgatctgtcaatgttttgaaatcttgagctttcaccatgtcggaaccaaggatcagcatgtctaagtcaggaagcttgaactggttacggtatacatactccatcaccgggataatgagagccggtgtcgactccatcaccgtgattctctgagagttcatgattttatatatttcagcaggttccagccgtgtttcatctgggcaaacgattagagtcccgccgttggtcaatgttctcgccaaatctcctgagaagacatcgaatgaaaagctcgcgatttgaagcagtctgacaggcttccgatccagttcataaatttgacgccaagcaagagcagcatgagtaaagttctgataggtgacaataacacctttaggcgcacccgtcgttcctgacgtataaatgatatataccggctcttcaggagcaggagataagttaaggttgcagttactttcttcataagtgctttcatcgtcaaggcagatatgagacatctcagattcaggcaagtttgaaatcaaatgcttcaattcctgctgtgaaagtagaatatctgccccgctatcacgaagaatatattcaatacgggcttttggataatgtgaatcgattgggatatacactccgccagctttcatcactgccagcactccaacaattgcatcaatggaccgcttggctaaaacagccacagttggcttcggtccttttctgttttgcaatgttcgtgccagacgattggctctttcatttagaagccgatagctaatctctgtttcgttatcaataacagctatatgttctggaatttcttcagctttcgcttcaaatatgcgatgaaaaggaacatctttttgagcaaattcaacctgagttttgttaaattcaaagactattttttgtttttctttatcactaagtatgtttatttgtgcaaggcttgtttcaggggttgaaagtgccgcatgcagaaattggataaaatgatcagcccaccgttcaatcgtagcttttaggaatacttctgtactaaattccatttcgcagcaaatagatccacttacttccgtagctattaatgtgatatcaaataaagaaatgtaatgtgcgaaattggcaggccggacttttatttctctcagatctatgtcctgtttttccacattttgaaggataaacatcgcatcaaacactgggttccggctcatatctcgtgtcaattcaagcttatcaacaagctgttcgaacgggtaatcctgatgctcaaaggcttccaatgctgtctcacgcacttcctgcaaatactgtacgaatggcttcccgccctccgggcgcgtccgaagcgccagcgtgttcacaaacatgccgagtatcgtctcaagatccttgtgcggccggccggcgattggcgagccgacgatgatatcttcctgtccgcttaagcgtgacaagaacgcggtgtaagccgcaaggagcaccatgtacagggtgcttccgttttctcgtgccagcttgtgaaggcctgatgcaacctcttgatccagcgtaaatgagaccttgtcaccagcgaagcttcgcaccggcgggcgggcatgatcagcggggagatccagcacaggcagctcgccctcgagctgcttcagccagtacgcctcttgcgttttgtacgcgtctcctgttttgaatccttcttgccatacggcataatctttatattgaatgcgcagcgccagaagcttccgattattgtacagctcgccgaattcttgaatcagaatgttgacggaaacaccgtctgaaatgatgtgatgcatatcaaccagcaacaggtgccgctcatctgatacctttacgatttgggcacggaacagcggcgcttggctgagatcaaacggtttgataaatgcggctgcggcctcctgttcggttcgttcgccgagaactgtagtctgtaacgtaaacggcacctcgtcatggatgcgctgcaccggatcgcctccttcgtcctgttcgaaggcggttcgaagcgactcgtggcgcttgatcagctcttggaaagctctgtccatcctttcagggttgagcttcccttcgagctctaacacagccggcatattgtagcctgtccctccgtcttccagctgctgaaggacataaatccgcttttgggcagaggaaaccggataggtttcctgtttttcagcgggcttaatcgcttcatatggactgtccgttccttcacggataacggcagccagtccttctactgtcggatgggcaaacacatcttttagcggcacctgtacatcgaattctttggcgatccgtgagacaagcgccgttgcttttaaggaatgtcccccgcggtcaaaaaagttgtcgtgaatcccgacagggccatttttcagcacgtcctcccacagctgagaaagcttcatctcagtcacgtttctcggcgccgtgtaggtctccgcatctgccgctccgccaggagctggcagggcgtttcggtcgagctttccgcttggcgtaaccggccactgttccatctctatcatataggctgggaccatgtagcccggcaacagtctctcaagctgtgcacgcacttcgtttctttggagcccttctacataagcgcataattccggctccccgctgtctgtccgtacggtaacagccgcctctcttacgccttctatgcttcttagtgccgcttcaatttctcccggctcaatccggtagccgcggatttttacctgatcatccgtgcgcccgaggaattcaacattcccgtcagggagccagcgcgccacatccccggttttgtacatgcgttcccccgggtaaaacgggtcttcaagaaaacgctcctccgttaatgccggccgattcaaataacctctggcaacacccgctccggcaatgtacagttcgccggcgacaccggaaggctgtacggctaaatgcggatctaaaacatacaaacgcgcaccgggtacgggcttcccaatcggaatccgcaaacgatccctgtcccgttctggatccaatacgtaaaatgccgcgtctaccgttgcttctgtcggcccgtaaccatggattaatgatacctgcggcaatacagaagcaaaacgggctgccgtacgcggcgcaagcggttcacctccggcgaatacacgcttcaggcttgtgctgtcacgcaacctttcgatttccgcttgatcgagaaagctgttcagcatagccggaataaaatgagccgttgtcacgttttcctgatgaatggcttttacgatcaatgccggatctttctcccagccgggcggaagcagatacgccgaagcaccggaaagcgaccaccaaaacagctgccacacagacgcatcaaaggaaaaagaggttttcaccatgacaatgtcatcttccgaaagcggaaactggtgctgcatgcctgtcagaaaggaaacagcctggcggtgctcaacggccactcctttcggctgcccggtagagcccgatgtatagatgacataggcgagagatccgccgtcagcaggagtaaactcatggttttctgctttttcgctcgcaagagatgtcatgtccacttcaagcgtttcgccagaaaagtttggtgcggagcatcccggctgtgtcagcaagagcgatgccccgctgtctttcagcatgtagctcagccgctcctttggatacgcaggatcaagcggcaaatacgcccctccggccttcaatacagcaaggacagcgatcagcatgtcaggtgaccgttcagacaggacaccgacgatactttcgtttgtgacgccgcgtgccgcaaggtgcgcagccagccggctggcgtacatatcaagctcagcgtatgtcagcgaaccgcctgaaaagcgaatggccagccgctccggtgtgaaagctgcctgtcgctcaaacagcccatgcagggtgaaagctttaggcgaaacagcttccgtcttgttaaactcatacaacaatttttgcttttctcttgtattcgtcatatctaattctcttataaagctgtgcggatgttgaagggcgttttccagtatggtaagcaaatgagattgtattcgtttaatatcctcaagagaaaacaaggtattttgatagtcgaaatttaattgaatggttccattgtctatccgttcttgtatttgaactgaaagctcattcgcggtgtatccgctgaaataaagcgctgtttcatagtcaaaatcatctgcattatgccactgaagtggctgatactgcatagatataccgataaggttgtgtaaatccttctgttcatttcttaattcatttacaagcaaattataaggaaaccgttgatgacgcataacagaaagctgttccctgcctattgtgcgcacaaaggaaagaaaatctgtgtcaggatcaaccgttattctgattggaagggaactaacgaacatgccgagcatttctttttcagcctttgaacctctgttgccatagtaggtgccaatggcaagatcttttttagaagtgattctgctgatgcatatgtaaaatgaagccataaataaggaaatgatattgatcttgtgttcttcgcagaagattcgaatcgtttgctctagatcaggtgaaagaatgatggtgtctctggatgcagatgtgctctgtttttgtaaggacgtctggtcggctaacgagtggtattccaacgggtgctcaaaggtttgtgtccaaaataaacggtcctttgcaaaccgcggagattgtagatattgactctctttttcgatgtagctcaagtaagaaggttccggctgatcaggtaaaggatctttctttttcattttttgataaagatctataatttgatttcccatcacatttaaagagattccatccattatgatatgatggaatttcgcaaatagccaaacttcatgagagtcaattctaaggaggtaaaattgaaaaagaggcgagttgaacagtttaaatggaatgctcgcttgatcctgaatccattgctctatttctatcatttcaacatttgaaaaatcaattattctaagtggataatatttatattcagtaaggtgcaatcgcggctcaagctcttctccttctaacagctgaaatctaatggcgtcgttgcgggagatggaatgattcagtgctccctccagagtatcaagctcaatattgcctttaaatttcacacaggctgtgagattgcaaatactggtatctggctccagcagttcggtaaaccacactctcctttgggcatgggttaaagaataagtatgttcgctcaacggattccctccagttctcataataagaggataagaaaatgtagaaaaaagcagaaaaatgacaataaaagaaattatatgactatataatccatatatgcactatattaacggatattttttaaagtacaataaaaaacattaaatttttataacatttttttgaatatagtattatttctttatttttcgtttctttttttatcaaatttccggatataaagtgataaaagtattgttttacataaggtcttatacactactttttaatcggactaatttgcttttgcccatcattcttctaattgttggaaggttcgacaaagcgttattacagacataaaaaaacctgttttctcttggaaaacaggtctgccgctattattgatttgccaaaatgacagcgatttgatcctcaatatcttttccatcctcttcatcaatcaatccatttagaagaatagagaaaacaagtttttttccgctctttgtttctgcgtaccccgatagagagcttaccgtactgagcgatccggtttttgctcttacttttccttgtgcaggagtgtctttcatgcggtttctcagcgttccgcccaccattctgtcaggattgcccgcaacaggtaaagaatttagataagccgagaaccaactctgatcctgaatgtcatataacagctgtgaaagttgatctgaggatacagcatcaatatgtgagattcctgatccgtctcttaagacgagtgatttagaatcaacaccaaattccggaagcgtactgtttaacacttcgagccccttttcccagctcccttctccttttttcactttccccatctcttttacgagcacttcggcatgtccgttattacttaatttcatgaacggcacaaaaagtttcgataaaggcattgagcgatgagagagcagcacatctgaagaactaggtgcttcacccgtcttgatgtcccctttcacagtaataccttgtttttttagtgactgcttaaataaatctaaggcatatccggcaggctcccagacagaaatccattcctttgtcttgtttgcgtcaaccggtacgctcccttcaattgtaatcgtgtttgttccatgctctctttcgattgtgaggtctttctctgaaccggcagcagtcgtttcagcatcgttctttatcgttatataatcggttttcggagagacagacacggcaggctcttccccttctttttgatttggggtgacctcaacaatcacagtgcctgcatcatagtcttcgtttggagacgctgttagagcggagattggcgcgccataatatgtgtattcatcgctccaaggcatatcaggtgataatcgcatgtcatcatgccacgtatcatcaccgatcagattgcctttaattacttttacgccggaatgtttcaatttctcagccattttgtcaaaatcagatggtaaaagtgtcggatcgcctttccctttcaaataaaggttaccattcagctttttccctttcagtgttccatccgtccggacctcggttgtaaaagaatagttctcgccaaggacagaaagtgccgcggccgctgtcaaaagctttagagaagaggcaggcctcattcgggtgtctcctgaatgttcatatagaacagcacctgtttccgcagagcgaacggtgatgccggccattgcgccttcgagggcaggatgatcagctaaaatcttatcgatctgcccggaaagtgcatcttgtttttcagcggcaagcgcagcctgatgcatataaggcaccgaagcaacgacgaaaagcagtaaaacagcaacataaagctttatgctttttttcattcatttccccgcctctctgcgcttcatcattggctattgatgattcagttcaatggtgatactgcttttagctgtcgtttcttctcccggctccagcacttgtaaaccagtgagtgacgaaggtaaatcaagattcactgcgtttgtcacccatgtgtaaggctcagggcataaatacccttgttttccgtccgcattgtatacaacccaatgtttaaactgttcatctgccttataaataatgctattatgtgcatgctgatgataaatgactgcctggttttctccgcccctcttctgataagaagataaaaagacatcatccagctgcttgtggcgcaaatccattccttcatgcaaagcttctttatacgggacatccatcagtttccctgtcggcagcaggcgttcatccaactcccattgctgatctgctgtcagggaaaataatgagctttctgccggaaatataaatgtagtatgataaccaattccccaaggaaacgcttcctttcctttgttcatgaccgtcgcatgtttaaatagagtattcccctttaccgtgtatgtcatccgaacgacggcatggtgaggaaattgcttatacacatgggggagcccagaaagatcaatttctgtttcaacaatcacttcttcatcagttttcttcgcggtcactacgttccacttttcatggtaaagaaacccatgaagatggttgtgtttatccttctcgttgatatcaaaatgatacgttctgccccggaaactgaatgtaccgtcacttatgcggttaggcgggaacaggattggaatgccatacaatgttggtgtgtcgtgaaaactttctgctgtttccggttcacgcaaaagctggacatttgttgttttgtccacgagagaaatgacgttgctcccccactcagggacaacaatcatttctagatgttcgttgcccgctttgatggccggcgttcccaaatacgtgattttctcaataaagtttgccatgtttactcaacctctccttgattcattgctagtataagaattcaatgtactgtaccatatttcctccattttatattttcccctatcaaataaaaaaacaccgttcaaacttatgaacggtgtgattcggaggctattggatgagacgtgtgatttgtttctttttccagacgaattgataatacccataaatcaacagcaagctgacggcaaacgcagctggataaccaacccagacgccgagtatttcaagctttgtatagtgagaaaggacgaaagcgacaggcacctctactccccagattgcaaaaatactgatgacggtcggccataaaactgttccgcttgcccgcatcgttgcagaaataatttgggcatttccaaacagcaaatagctccacaatgtaatcatcaaaagacggtgcgcaatgtaaagcgtctcttgctcggttaaaaataacgataaaatctgatgtgaaaaaacatagatcagaatgatcagtacgccgccaatgatataattcagccaaatccccacgcgaatgacctgctttaagcggtcaaactcgtttgccccaatcgattgcgcagcgaaaatagaaaccgcaataccaaggctgacggccggcatctgtacatagctggctacctggttgaccactccgtatgcagctgttgcattagagccgtaatgattgacgaatgaaataaccgctatctctgataatgagacaagaatcatattgatgcttgctgggaccccaagacgcagcaggagaaccagcagttccttatccattttcaaataacgacgcactgttttatcaaattgcagcgggtgttttcgctttcgtaaatacaccattaacacgagaaaagtcgcaatcgtggaaatgacagttgcatatgccgagccgtatatgcccagtttcggaaaaccaaacatgccaaggattaaaacaggcaaaagcgcgatgttgatgaccgtgctcacaatcagcgtataaaacggtgtcttagaatcccctgttccgcgcaaaaaggtagtatatgcaaaatataaaaacataaacggcatagcataaaataaaatacgtgcatagttagcgctgacatgaatgacattttcaggcgttcccattaaacgaaggatatccagggtgaaaatactgccgatgacggctaacacaacgcctaataaaaatgtaaacgtgagcgtcgtcccgacaacagcctttagccgttcctcatttttcgctccgtaagcttgtccgatcagaatcgaactacctgaaccgatcccaatcgtaaatgagattaaaagaaaaaataacgggaaaaaggatgatacagctgccactgcatcaacaccgagccatctgcctacagccatcatcccgactagctggccgactgattgcagcacattgctcagcagaagcggcaccaaaaagagtgacatcgaccgccaaactgatggtttgcttttcttttgagttacaagaggttcttgtgatgtttccatattaaaggactcctttatttgaaatcgtttttaaacatgccctcattttttgacaaaaacaggatatgcaacatgttattattcatcactgcacatatgaaacccttcccgattcttctaatttcacacatctttttagcttatgaagaataaactagcaagtaatggcgtattttttgtgagtaaaagaataaaaaaataatttatgcaaaagtattgtaatctatccgtaattattgtaacatttgtaacataagagaaagagattttgaaggagagagcgataatgaaaaaatgtcttctatttctaacaaccattgcacttattctgtcattaagcacaaatgcatttgcgaaaaatacatcaggcaatttatcacaaaaacaagcattacagttggcattatccgctagagaacatttttggaacaccatgagcggccacaatccgaaggtgaaaaaagcagtttgcccatcaggcacattcgagtatcaaaatcttcaatatgtatacatgtgcagtgatctaggcactaaagcaaaagcggtgaattatttaactcctatttttacaaaaacagcaatcgaaaaaggctttaaagattatcatttcactgtttcaaaaggaaaacttgctgttccaatcggtgacggagacaatcttttgaattggaaaaaatcaactgctaaactgatctctaaaaaaggcagcacaatcacatacgaatttaccgtccctacattagacggatccccttctgcaaaacggaaagtgacatttgtgaaagaaaataaaaaatggaaagtcaatcaatttgacgcagttatataagaataacgcccggtataagcgggcgttttttatttggtctgcataaagaaagacaacaggcgaaaagtgcctgttgtctttttgtgaatataacgctctaggagagattcgaactcccgacctgcagtttaggaaactgctgcactatccgctgtgctactagagcttttggtatttatatagtagctctgatgatcaatattttcaagcgatttgtattaaagccctccaaaaaccttatatgcggctcttgtcgtatcttcatcaataccgatataccgcattgtaattgatggtgatgaatgattcagtattctctgcagctcggcgatgtctttcgttcgctgataaaaatgatagccaaacgttttccggagtgtatgcgtccctatctcctcaagtccgcacgccgcagcggcctctcttaaaattctgtaggcctgaatgcgggaaatcggcttcctggtgcgcactgatttaaaaagatattcgttttccttcatgtctttcgtatactcgtatatttcctgtttcagcgattctaaaataagaatctttcttttctttttcgttttgctttcagtcgcccataaatgatctttattttgaacgtccttcacttgcagcggcagaatatcagaaatgcggagcgcgctgttgatgccgaaaataaacagaaaataatcccgcttgtttttgttaagcaaatactgtttgacttcttggattttctctagactgcgaatcggctgtacaatatgcatcaaaaaactccttaaaaacagttatgtaacgttttgaggtctatgttactattatagctgaaaaacgttgaatgtcaaagtgcggcggcgtttatgtaacataatatacatagtgttacataagcttttaaaaaagcttcttcaaaccttcaccctataaaataagctttaaagcctcttataaagcttttaacctcttggatacttatccccctactaatcatcaaaaatcctcttaaaacgcaatctgacgctcccaattttctggagcttccgcaaaaaaacataaaaaaaagacacaacttcaaattgtgtcctaatcctcatcctttacatcaatatcttccgggattggttcatttaatatttcctgcacaagtgctttgtaattctccagctgttcgagatgcgttttgaactgctctttataaatcaaaaattgctctccgtcatgaacggctctgattttcccttcgagcaccaagcttttaatataatcctctgaaagatttgtatattctgctgtttcttcaatcgttaaatacatatagcagtcccttcttaatccgtatgctgattctaatatagcacatggctcatatcaatataatcaattttgcacagaaaaacggcattatgcactatataatataccatttgtcacttgtgaaaacgctgtaatttttttacgctaagattgtaacaatacagcttcatataggagggagaacatgaaaagaacgtggaacgtctgtttaacagctctgcttagtgttctgttagtcgctggaagtgtcccttttcacgcggaagctaaaaaaccgcccaaaagctacgatgagtacaaacaagtagatgttggaaaagacggcatggttgcgaccgcacatcctcttgcttctgaaatcggtgctgatgtgctgaaaaaaggaggaaatgctattgacgcagcggttgccattcaatttgcactcaatgtaacagagccgatgatgtcaggtattggcggcggcggttttatgatggtgtatgacggaaaaacgaaggatacaacgataatcgacagccgtgagcgtgctccagcaggcgcaactcctgatatgtttctggacgaaaacggcaaagcaattcctttctctgaacgtgtaacaaaaggtactgccgttggtgttccaggcactctgaaagggctggaagaagccttggataaatggggaacccgttcgatgaagcaattaattaccccttctattaaactcgctgaaaaaggctttccgattgattcggtgttggcagaggccatttctgattatcaggaaaagctttcacggactgccgcaaaagatgtatttttaccaaatggcgaaccgcttaaagaaggagatacccttattcaaaaggatttggctaaaacatttaagcttattcgctccaaaggcactgacgctttttataaaggaaaattcgccaagacgctttctgacactgtccaggatttcggcggatcaatgacggaaaaagatttagaaaattacgacattacaattgatgaaccgatttggggagattatcaaggctatcaaatcgctactactcctcctccaagctccggcggtattttcttattgcaaatgctaaaaatccttgatcattttaacctttcacaatacgatgtccgctcatgggaaaaatatcagctgcttgctgaaacgatgcatttgtcatatgccgaccgtgcgtcttacgcaggtgatcccgaatttgtaaatgttcctctcaaaggcctgcttcaccccgattatattaaagaacgccagcaattaatcaacctagatcaagtgaataaaaaaccgaaagccggtgacccttggaaataccaagaaggatcagcaaactataaacaagttgaacagccgaaagacaaagtagaaggccaaacaacccactttacagttgctgaccgttggggaaatgttgtttcttatacaacaacaatcgaacagctattcggaacgggtattatggtccctgattacggtgttattttaaacaatgaattaacggattttgatgcgataccaggcggagctaacgaagtacagccaaacaaacggcctttaagcagcatgaccccgacgattttatttaaggatgacaagcctgtcctcacggttggatctcctggcggggccacaattatttcatccgttttgcaaaccattctctaccatatagaatatggtatggaattaaaagcggctgttgaagagccgagaatttatacaaacagcatgagctcttaccgttacgaagacggagttcctaaagatgtcctcagcaagctaaatggcatgggccacaaattcggcacaagtccggtggatatcggaaacgtgcaaagcatatcgatcgaccatgaaaacggcacctttaaaggtgtagctgattcaagcagaaacggcgcggcgatcggcattaatttaaaacgtaaataaattaaaaaactgtactcgcttcaaatgagtacagttttttatacacatctttaaaataaaaactgacaaacgtctttattctgctaatgcacgtctatcttcatcttttcatttcgtttatctcatcaagaaatgtctgaaacgcactcgtaataaaaaagtctttcctgtatataaagacgatctctaagtcttgatatgctggtggcagctgatgaatccatacatttgtacgatgctcggagcagtcaacagcggactttgggagcagcgccgtacccatcccggcggaaacaccttttataatagcctccaatgtgccaaactctatgattttttgattgtgtatgcctgcttcctctagtaatcttttgaccctgtcacgatgagaacagccagccccaaaaaagagcatcggctgctgaagcatgtcttctgccgtcccttctcgtgatgaaatcaaaactaattcatcataggagacatggagttgtctaaccgcagcgtgttcaaccggcccatatacaaaagcgccatcaactttatgatcaagaacctgttgaatcaaatgatgcgtatcagctgtgttcactgataaatccacttcaggaaaacgcctgaggaaggatgctgcatgctcaggcagatgcgttaccgccgtcgtttccagtgatccgatccgcaaaggcccttttggttgcctgctcattcgggtcgatttttcagcttggtctaacagcgataatacttgatctgcatattgtaaaagattttctcctgcagcagtcagcttcattccccgattcgttcgatgaaaaagcctgatattcaaatcttcctcaaggttatgcactctggctgtcacattcgactgaacataattcagcatttgggctgctttcgttatgcttccttcgcgggcaacagcctgaaaaatctttaaatctccgctttccacgcgctctcacctgcttgctatgatgaaaagtgatattggctatcatatttgttcattttactcgaagaaaaccgctatgtaaaatatgtaaagatatgaaaatacaattcaatgaggaggcagacagcatgaaagctataattcacaacggaaaagccggtcttctggggttatcagttcaggacgttccatcaacaaagcctggatacggagaggtaaaggttaaattaaaatctgcaggcctgaatcatcgtgacttgtttcttatgaaaaacaaatctgaacaagatcctcacataatactgggttctgacggcgcgggtatcatcgaagagattggtgaaggcgtgaaaaatgttactgttcagacagaagtagtcattttcccgacattgaactgggatttgacagaaaatgttccacctgtacctgagattctgggaggtccttcggacggaacacttgctgaatatgtgatcattccttcacaaaatgcaatcaaaaaacctgcttatttatcttgggaagaagcgggcgttttacctttatccgctttaactgcatatcgggctctgtttacaaaggggcaattaaaaaaaggcgagcatctattgatacccggcatcggcagcggtgtagcaacctacgctttatttatggctaaggcgattggggcaacagtaagcgtgacctcccgcagtgaggagaaaagaaaaaaggcgctgaaattaggtgctgattacgcatttgacagctacagcaattgggatgagcagttgcagggaaaaaaggcggatgttgttcttgacagcataggacctgccctcttttcggaatacttccgccatgtaaaaccaaatggccgtattgtcagctttggggcaagctcaggggataatctcagttttccggtgcgttctctattctttcctcaggtcaatgttttgggaacctcgatgggaagcggtgaggaatttcaagctatgctcgctttcattgataaacataagctgcggcctgtaattgaccggatatatcctttagaaaaagcatgtgaagcatataaaagaatgcaggaaggcagacagtttggaaacatcgggatcgtaatggaataaaaaaagaaaccggctggcagccagaccggtttctcttatatgataatcccctttatttacggaagaactgaactccccatcaaatatcgatccacttcacgcgccacttctcggccttcattaatcgcccatacgattaagctttgccctcttcttgcatcccctgcggcgaatacaccatcgatatttgtttgataatccccatatgctgcactgattttgttatttacagaatcaacaccgaactgtttcaacagcggctgttctgtgccttcaaagccgatagcgataaagacaagctgagcaggccatactttttccgttccaggcagctcgcggaactcgtatttcccatgctcatttttcactttttccatttggatggtatgaagctctttcagctttccgtttttatccgcaaccatttttgtcgtttgaatggagtattctctcggatctcttccgaattttgcttctgcttcctcgtatgcatattcaagcgtaaagacgtgtggctgttcaggccacatattgtcattcgtgcgggctggcggaagtttcgggtgtttgccgaattggtgcacgcttttggctttttgacgcagagcagtagccacacagtcagctcctgtatctccgcctccgattacgatgacatccttccctttagcatcaatgaattgcttgtctttaaaattagaatctaaatagctttttgttgcaagtgtcaggtagtccattgcgtaatggactccttttgagtcgcgtccttcaattaagaggtcccgctgtttttgagcgcctgtgcataggatcacagcatcaaattgctcctttagctcatcagctgtaatatcaacaccgatttctgtgttcgtgacaaaatcaattccctcttgcgtcagcaatttaattcggcgttctacaatgcccttctcaagcttcatgtttggaatgccgtatgttaaaaggccgcccgctctgtctgagcgctcaaaaacagtgacagaatgccccgcttgattcagctggtcagcactcgccagtccggctgggcccgacccgacgatagcaacttttttgcctgttcgtttttttggaattctaggttgaatccagccgttctcaaatcctttatcgataatggtccgctcgatgtttttaattgatacggccgggtctgaaatcgctaaagtgcatgatccttcacaaggagcgggacatacccgccctgtgaattcaggaaagttgtttgttttcaacagacgttccaatgcttccttccatctgccccggtagacaagatcattccattcaggaattaagttgtaaatcggacagccggatgtaaatccgttaatgtccgcaccgatctggcaaaacggtgtaccgcaatccatacaccgcgccccttgccgtttcgatgcttcttctgaaaaaggagcagaatattctttccaatcctttaagcgagtgagagggtcccgctccgcaggtttttctcgtttgatctccataaatccagttggtttccccatgttcctctccccttccttactgtactaccgcttgtttttgtcccgatgctgctgtattctgctttggcttcgtgttggcctcaaaagcgaacatgatggcttcttcatctgataaacctgcagctttttgctcttcgatgcttgcgagcatttgtttatagtttttcggaatgactttgacgaattttttcacactgtcttcccattgatctagcagatcttctgctttttggctgtttgtatacgcagtatgtctttcaagcattgctttgatttgctggatttctttctcatcctctaatgattcaaataaaatcatctcaaggttgcatttgcgtttaaacgctttgacatcttcggtcagtacataagcgattccgccggacatacctgccgcaaagtttttgcctacatcaccgagaacgacaacgctgccgccagtcatgtattcacagccgtggtcgccgatgccttctacaactacgttcacaccgctgtttcgaacggcaaagcgttcaccagcacgtccgttaatatatgcttctccgcttgtcgcaccgtaaaaagccacgttgccgataatgacattgtcatccgaagcagagttgaatccttctggtgacttgacgatgatttttccgccagaaagcccttttccgacgtaatcatttgagtctccgtctaaataaagcgtcatccctttaggaacgaaagctccaaagctttggccggctgatccggtaaagtgcaacttgattgtatcttcaggaagaccttcttctccgtaacgctttgagatttcactgccggttatcgttccggctacacggtttgtattgttgatttcgatagaaacttccgcttcttttccagattcgatggcttcttgtacggccgggagaatcgctgtaatatcaagtgattgatcaattttatgattttgcggcgattggaacgtccgcaccccatcaggctgataaagaagggtagacaaatcaagctggcttgctttccagtgctcctttgcccgttcacttacatgaagtacatcagtgcggccgatcatttcatcaaatgtcttgaagcctaacgcagccatatactcacgaacttcttcggcaatgaacagcatatagttcacaatatggtcaggatctcccatgaactttttgcgaagctctggattttgtgtcgctacaccgacagggcatgtatccaaatggcaggcacgcatcatgacacagccgagtacaactaacggagccgttgcgaaaccaaattcttcggcgccgagcaaggcagccatcacaacgtcgcggcccgtcatgagctttccgtctgtttctaatacaacacggtcacgaagtccgttcagcattagtgtttgatgtgcttctgcaaggccaagctcccacggaagccctgtatgtttaatactggttttcggagaagcgcctgtacctccgtcatagccgctgatcacaatgacatctgcagtcgctttggcaacacctgcagcgattgttcctacacctgcttttgacaccagctttacgctgattcttgcgtcacggttggcatttttcaaatcgtggatcagctgggctaaatcctcaatcgaataaatgtcatggtgtggcggaggtgagattaatccgacacctggcgttgacccgcggacatcggcaacccatggatataccttgttgccaggaagctgcccgccttcacccggcttagcaccttgagccattttaatctgcagctcatcagcattgacgaggtaatggcttttgacaccaaaccgtccggatgcaatttgtttgatcgcacttcttctatcatcgccgttctcatctggaacaaagcgtttgggatcttctccgccttcaccgctgttgctttttcctccaagacggttcattgcgattgctaaagcttcgtgcgcttccttactcaaggacccgaatgacatcgcacccgttttaaaacgtttgacaatcgattcagcggattcaacctcctccaacttcaaaggcttgcggtttccgtcaaatgcgaacaagttccgcaaaaatccgatgcgttcttcatcagccgcttttgtatactgtttaaacagattgtaatcatttctgcggcacgcccattgcaaagtatgaatcgttttcggattaaacgcatgatgctctccgccatttctccattgaaagtcacttcccggttcaagcgttttgctgtaatcatcctgatacgcttcccggtggcggcgctgtgcctcttctgcaattgtttgtaaatcgatgccgcctagctgtgatgcagtacctgtgaaatagcggtcgatcacatcgcggctgattcctaccgcttcaaagatttgggcgcctctgtagctttgcacagttgaaattcccatcttggacatcacttttacgacgccctcagtaatgctttttccatatttgctgaccgcttcttcatagctgatatccaaacggccttcatcaatttcctgcttgtaggtcgcataagcgagataagggttaatcgcatctgcgccataaccgattaacgctgcaaagtgatgcacttcacgtgcttctcccgattccacaataatgctgaccttcgtacgcagccctttgcggattaagtgctggtgcagcgcgcttactgccagaagcggcggaattggtgtcagtcgttcgttcatctttttgtctgataaaattaacaaacttacgccttggctgatggctttctctgcttgtgtgaacatgtcctttaatccgcgttcaagatcctctgaaaacagcacatcaattttttggctttttaaatctggatgaacaatcgttttcaatgcgtaaaactgttcattggataaaacaggtgtatacagtttaatccggcgaacatttcgttcacttggatgaagaagatcgccttccgcaccgagccaagtcatcgttgaagtgacaagctgctcacgaatcgcgtcgattggcgggttcgttacttgtgcaaacagctgtttaaagtagttaaacagtgattgcgctcggtcagatagtacagcaagcggagcgtcattccccattgaaccaaggggatctttgccttctttaataacaggaattagatacttttggatatcctcatatgtgtatccgaatgccttctggcgagtaagaagatcactaaattgttcttcttctcttgactccggatcaggatttacttgtacaagctcttcttcaagccatttttggtacggatactcagttgcaatttgtgttttgacttcctcatcggagataatacggccttcttccaggtcgattaaaagcattttcccaggctcaaggcggtttttatataaaacgttctcctgttcaacttcaataacgcctacttcagatgagaaaataatataatcatcttttgtgacataataacgggccggacggagaccattccggtcaaggattgccccgatttgtttaccgtcagtaaatgaaatggctgtcggtccgtcccaaggctccatcagggagctatggtactcgtagaacgcccttttttccttggacatatgcgtattttccgtccaaggctctggaatgagcatcattgccgtatgtgccggtttgcgtccagccatcacaaaaaactcaaatgcgttatccaaaatggaagagtcactgccatcagcattgagaatcggcaaaatcttgtttaagtcctcaccgaagctttcagaaacaaattgctgctcacgtgctctcatccagttgatatttccgcgaagggtgttaatttcaccgttgtgaaccaaataacggttaggatgcgctctttcccatgtagggaatgtattggtactgaagcgtgaatgaacgagcgcaaaagcagaaacgaatgcttcgtcttgcagatcagaataaaatgcatcaacctgttcaggtgttaaaaggcctttgtaaacaatggtctggcttgaaagactggcaaaataaaaatcaagatcttccgttactccccaattttcagcctgtttacgaatgacatacaattttcgttcaaaagataaattgtcctttagatcagaacttgcgccgataaatacctgacggacaaacggacagcttttttgcgctactgttccgatttttccgacatttacaggtgcagttctccatccaagaacgacttggccttcttgttcaatcagtgcattgatttgcttttcaattttttttctttcatcttctttctgtgagaaaaagaccattcctaccccgtaacgttctttttctggcagattgatgtctttgcactcttttctaaagaaagcatcagggatttgaaccagtaagccggctccgtctcctgtatccggatcactgccttgccctcctctatggtctagctggcaaagcatcttaagtccttgtttgacaatgtcgtgagtctgcttgccctttaagtgtgcatataggccgattccgcatgcatcatgttcaaattcaggacggtagagaccttgagcttttggcatttgattgtacgtcataattcctctcccccgatcaatttccgataataccggtcataaaatctaacaactctataatcattgtaggttttcaaaacgatataaacaatatataatttagatcaaaagaatctcaaaatgagatagatggatgtgagacaaacatggagctgcgccaactgcgttatttcatggaggtggctgaaagagaacacgtttcagaagccgctgatcatttgcatgtggcccaatcagcaatcagcagacaaattgccaatcttgaagaagaattaaatgtgaccttatttgagcgtgaagggagaaatatcaaactcacgccaatcggaaaagaatttttgattcatgtgaaaacggcgatgaaagccattgattatgcgaaagagcaaattgatgagtatcttgacccgcatcgcggaacggtaaagatcggctttcctacaagcctcgccagccagcttttgccgactgtcatttcagcgtttaaagaagaatatccgcacgtcgaatttttgctgcgccaaggctcctataagtttctgattgaagctgtcagaaaccgcgatattgatctggccttattaggaccggtgccgacgaatttctctgacataacgggaaaaatattatttactgaaaaaatttacgcgcttgttccattaaatcatccgcttgctaaacaaaaaacggttcatttaatcgatttgcgcaacgaccaatttgtattgttcccggaaggatttgtacttagagagatggcaattgatacttgcaaacaagcaggctttgctcctctcgtttccacggagggtgaggatttggatgctatcaaagggttagtgtccgcaggaatgggcgttacccttctgcctgaaagtacttttgctgaaacaacacctcgttttactgtgaaaattccaattgagttccctcaagtaaaacggactgttggaatcattaaaccgaaaaatagagagcttgcgccttctgcgaatgatttttatgagtttgtcattcaatttttctctaagctggagcagtatcaataaaaaaatgaacccgagcttctatatagaagcttcgggtttttttctgcaaattaatttacaggtaaagaaaaatccacatggcaaacaaaggcttcttgatcaattagagctctgtttgtcagttccttgttcttttccggttcttgaagctgtacagaagagtaattgacgattccaaggccgatttccgtcccttttgaatccattagccgaacaactgaaccgcttttaaatttccctttaatcttctgtacaccgtctaggtataaactcgattggccgtttgttatttttcgtgaacaatcatctgataaaatcatttcaccttccggaccggaattaaaagcgatccattgctccttttgattcaacggaagcgttccttctgcttcaaaataggtgccttccgcctgttcatgaacggcgtgatataaaatatcgccggcatctgcctgaccaaggaaacctttaatgccagacgccattacgattttaaacgcatcaagcttagagcgcatgccgccggtgccaacgatgcttccagtgtcacctgcgcatgcttcgatgtcaggtgttatttcactcacccgctgtatccttttcgcttctggatttgtgcgcggattgccgtcatataatccgtctatatctgataaaatcacaagcatatctgcatcaatcaatcctgcgacttttgccgcgagtgtatcattgtcgccaaacttgagccgattgacggtaactgtatcattttcgtttatgatcgggatgatgccgcgctcgagcagtacattcattgtattcctgacattgttgtatcgatattcatctgaaaaatcgcttcttgtaattaaaatttgggatgcgacatagccgtgtgccaaaaacagctttgaataagcctccatcagcaatccctggccgattgaagctgatgcttgtttttctggaagcttctcgggcctttggataaatccgagtttccgatatcccgccgccactgcgcctgaggaaaccaaaattacttcataaccggcgtctttgagtttgacgacctggtcgaccaacgcttctaattttcgaatgctgatttctccatgaaggcttgttaatgaactgcttccaatcttcacaacgactcttttcatgcttgtatcaggcgtcactttatcactcctgatagcggcgctgcagttttttcgatatcttcgctgatttcctttgaacgcttagccgcatgctttatcgcttgagaaatcgcttctccgccgccgctctttttcaaggcttgcagccccgctgctgtcgttccgttcggtgacgtgatattatctcttaagatctcaggatgttctcctgtttccatgagcatttttgcggcacctaaaagtgtctgtgcgccgatgcttcgagataactgtttatcgaggccagcttcctcgcctgtcttttcaatgaattccattaaataataaaaatacgcggggccgctgcctgcaattccggtgaatatatccatttgattttcttggattgtatagacttcgcccatgcatccgagcaatgcttcggccagcttcttcaggtcttccgacacatattttccaagggcaatagctgttgcagaagcgccaatcatactggaagtgttgggcatcactctgacaaccggctgttcattaagcaatgattgttcaataaaagaggtagttatgccggcaaggaccgacaatattaattgatggggttgaatacgtgattttagtgatgacagagcgttttcggcgtcttttggcttcattgccaaaatgagcacatccatgtcttcaatacatagttggttcggcaaggcgcctttaatgccatattgaagttcaagttcagttaatcgctctgtattgctgcggtttgtaacgcagatgttttgtttcgggattttgttggcacgaacgatacctgatatcattccttccgccatagatcctgctcctataaaggctactttcttttgatcaaagatcggtaacatctcctttgttcgcttttttgttcgcattttcacacgtttaaaatgttaccacgtgaggaaatgatgtcaagtttgaaggtcatcattgatttgtattgtttcttttcgacaaatatgtataatgaaaagcagaaaacacccggttcacactgctgcgccgggtgtttgtttctattaaaaattatctgagagagctttttcaatcagttttttacagcgatccagctctaccttcagctgttttttatatagcttggcggcttcgtaatctttaaattgatagaggacgacttcctggagcttagccccttctttttttactttaatttgttttagtatcccgtcatcaagaagctcatgcaaagaccggtatacttctgtatgatttggtttaaaaccaatctctttaaattcagaccgaagtacttcaagcagctttaacccatagagtctctcttgctctgtcatcgttatcatataaagcttcaaaaatgcgcgctgtttcactaaaaagcctgttgaactccttttttcttctttcatcatatgcactccttcttctgtcactgacaacactatgtactaaatattcaattttcttttattgttttccttctttatattaaagactgatagtccagtcatttcatatttactgattataggtgtagcggaaaaaataaatttcgactgaacatttggtacatagttttcttagttctattatagcctgcattcactgccagcttcaatttaaaacgattgtcagatttgcatatgccggtatgaatttcattcaaataaaaaaacctgtcgaaagacaggttttcatttttaaggatttgttgaccataatcccgctgttttgatgaaaatgcgtggatctaatttcaattgtgccaccatgtactcagcaagatcctcaggctgcatcactttttcagggttaccgtctgttaagttcaattcgatagacatatcactagcgacagtgctcggcgttaacgcgctgactctgatattatgttttctcacttcttgcataagagactctgttaaccctagaacggcaaatttagaagcgctataagcacttgttacagcagctcctctttggcccgctgtagacgaaatattaatgatatctccggctttgcgttcgatcatttccggaagcaccgcgcgagtcacatgatacacacccattaggttgacttgtataatattttcccattcatcggctgacagatctaagaaaccgccaaatttgctgattcccgcgttattaatgagaatatcgatatcaccaagctgttctttcacttgagcgacggcttggttaacctgctcggcatcttttacatctgcagcagcaaatgcagcttttacaccaagcgctttgacttcttctgccactttttcaacattagcggcagtccggccgattaacccaatatttacgccttctttcgcaagagcaagagctgtagcacggccgatccctctgcctccgcctgtgattagtgcagttttatgttgtaaactttgcaattgaagcaccctttctttgtttacatatgtacgatatcacattataagtacaatacatccaatacgcaaatcaaacgaactgtgtaaatatcatttcttctgattaaaaaagcggatacagggtaatgacataagaaaaggagtgaacatatgattatagtttatatcagtcttgtagtattagcagtttctattatcttcttaggagttaccgtgattcaaaacaagaaaaaaatggaccctgcactaaaggagctttcctctgttacgcaggctatgcaaaaacaaatcgaaggattaaaaacagaaacagagctgctgacgcaaaaacaaaagaagattcagcaggatgtccaaataaaaaaatacacgtttcagcagaccgcagctgaagtgaaagaagttccccaagcagtcaaagaggtgtggcaggcaggacattttaatagcagataaggatgaatgagatcccgttgttacgatcagaatggacaaatgggatctcatttttcgaggaggcttacacatgattataaaccgcagctgcttaaaagagttcgcagaaaaagtacattttcttccctcttcacttacaaagtccgatttacttactgatccatttcgtctccatcaagaaaacgaacttggcatctactattcacctcataatgaatttatcaatcgggatgcctcgcttgtgattgccgggatcacgcctggtttttcccagatgaagacagcgtacgaaacagccgccgaaagcctgcggcaaggcgggactcttgagcaaatggcagtagacacaaaaatagcagcgggtttctccggatcgatgagacataaccttattaccatgctggatttatgcgggctgccgcaagcttttggcattcaaagcgccgcaaagctttttggagaattacggcatatgctccatacaacttccgttattaaatatcctgtctttatccagcaaaaaaactataccggatacaaaccggctatcactcattctcctatcctaagcacttatgcttttgggcacttccctgcagagcttaaccatgtgacgggaccagctcttctcattccgttaggaaaagcggccgaaacagtgtgtgaaacattgatcagacagcacagcctccagaatttgatttgccttaacggctttccccatccatcaggcgcgaacggccatcgtttgaaacaattcagcaaaaacaaagagcaactagaaagacaaattcgttcctttgctgcattggttgatttcgctatagaaaagaggaaataaaagggatatgataaacaaaaacacaaacgtggggagtggttgaatgtttcctatattagaaacggatcggcttatacttaggcaaatcacagatcaggatgcggaagccatttttgcttgtttctcaaacgatgaggtgacacgctattatgggcttgaaaacatggaatctatagaacaggccatttcaatgattcaaacgtttgctgccctctatcaagaaaaacgcggtatacggtggggaattgaaagacgggacactaaagaactgatcggaacaattggctttcacgctctggcccaaaagcataggcgcgcggaaatcggttatgaaatcatcccggagcattggcgaaacggatttgcatcagaagtcatttcaaaggtcgtatcttacggattttctgcccttggactgacgcgtattggcgcagttgtatttaccgctaatgaagcatcaaatcggctgcttctaaaaatgggttttcaaaaagaaggcgttttaagacagtacatgtatcaaaatggaattccaaacgatacaaatgtatattctattttaaaatcaagcaaatgaacggacgacattctctcaatctgtatgcacactcccttcctcttcttggtgactgcccaaaatagaaggggcagccagcctctgcaccgactccagtatgggacagtaaatgctaaatagcctgatagaacacatcacaaaatatagtgaagaggcttattctttttcttgccccgcatgaatgatctgtgatgtaccaatggtttggccagaagaattcaatgctttcacctgaaaatatggcccaatcgaatgaacaagaatatctgtttcaaatccggttcggggagcatccgttcccacctcagacaatttgttaggtgctgtaccagctaacactttccaggctacagtttcagttgaaccgttccatgatgcataaacaatggctgcatcttcacataatggatttacagcaatactgggtggataaaacggcaagcctacccatttatccttaaacgccctataagaaagattttgaccaggaaactgcatatcatataacaaattcaacgaaggatcttttttattattaccagcactcctatattcagaaagatacggttcctgtccccatccaacgaattgatttccatttgatagtttctgaacatttccttgacttggaacatacagcgctggatcatgataataagttcgatctgcttttgcagtcatgttatggaaatcaagttgaaggattaaaccacgagcctctccctcaggcggagagcttgaagaagcacaacaagcatcatcaaatagacttatccgtgttctagacctaaaacgtgcatcatgttgccaagaaaatgttgcatttggctcaaaagtaaaatcgctttttttgccaccaagctgccagacaatctttcctgttgttttatcaaccaaataaatcgcccacatgttacgcatgcttattagaagagtattgttcggcccttcctcaactgaattcacgtgaaaacagtcccaaatattgttagcgcttgtggcggatgacgcaggtaacatcgagtcatccggattaacatgagcaagcacatcccagaagaaaagaagctctcctgtctcaagatctacttcttgaatggaataattgtcaaagtacccatctgccggacctccatacattgtgagatccgctggcacttgtttcacagcagtaaacaaagccgtatcttgctttgtaatcgtaaactcgtgaacatcagaggtaaatccttttttggcggtgagtttcttaatcactttataattctgattgatgatttgataaaaagctccaggttccggatcccccgccgggagattaggatcattagactgagttccagatattgttccttgccacatggtaagaacgggttcccctttgtaggattgtaccctaaagtccgtattttgtgtaaatctactatcaagaggtctaaaccatactgggttaccagcttgatctatgatcaatgcacctgtttgcccaatcatagttgcgccgaacacagtatagggtgcaacgaatattaagccgggtgctgtccctggcttgttgacatttatagaaaccttcataggatgcagggtaggagccgaaacaaagttccattcttgtgagcttgaatgatttgcggatgccttatcaccgcatcccccataaatggcacgcataattccgtatcgggacagaatcccgggttttcatcacataatgatttggcaaaggcaggattttgttggctgaggtttttaaaataacagacaatctcatgattgcgaacaggtaaactgttcagttgaaaagagagcgttaccttcttgtctacatgttgatagagtaatccttgctttgtaaatggaggcggatatgcttgatccggcaaggtgggaataatgtcatggatattgaaaatacgaatactattctttaccgtttggttgaaccgggacgcaaagacagggtcagcgactcgagggctgccataagtatacacaaaaggatttttaaatcgggtattcaccgcaatatcaaaagcggctaacacggctaaagctcctcctaaactatggcctgcgactaataatctttttgctgcataaagcttggttaattccccgatcagctcatttcttgtcgattgataaagacatgtaaatccacgatgggtttttcctgcatttctgacaaacggatatggtacttgatataagtcttggtccgactcattgtccttaaatgttcgggttcctctaaaaattacaatgatctgatcttgtgactcggcaataaaaccaaatacttcagcttccggatcctcaacaccagcaagagctcgtatggtatatcgaaggctatatccttttggcaagacaagcggttccttttcaaagagttgatatgactgatagatcatggccgatagcaatatcgaatcctcacggttaaacatataatataagcttgagtgattcatccgagcagctcctttcttttattcctagcatgttcctcgaaacggagtacacatgtcaggatcgggacaaaaccctggatttttatcgcataatatttcggagaaatcaggattcattttactaaggtatttaaaataacaagcaatcgcatcattgcgcggcgtattattcaattgaagagagattggatactttgtttttacatggtgatagtataatccttcctccgtaaaaggtggtggatacttttttgctgggaaagttggaaacgagtcatgaatatttacaattcgtatactatttttcaccactttgttaaattgggaagcaaagacagggtcaccgatacgcggactgccatacgtatacaagaaaggatgattaaacccagtgttcgcagcaatatctaaagcagctaacgttgccaaagctcctccgtagttgtgcccggtaacaaacagcttttttgacttagaaagtttatttatttgtctgattaaattgtttcttgttgattgataaagacatgtgaatccacgagacgttttcccgccatttttaacatagggatagggaacttgaaatatgtcataggatgctaaaagatccttaggatatgctgcgtatcctctaaacgctataacgatttgatcttgtgactcggcaataaaaccgaatacctcttccataggattctctacgtcagcaaaagcacgaatagtatatcgaagtttaaagccttctggtaaggtaagtttcccttctaaaaagaatggatatgtctgatagctcattgctgcaagaaatattgcggctttgctattaaaaatattgtttttatctaaagaaaccatatatacgcaatccctttcttaatataggtaaatatgatgttaatggtacaatatgaatgaaaacccggaattgctaatgatggtgatatgaacggggatatgggtaaagaaacgtggaagttacttaatgacggaataaaagaaaatgtaaaaagacaaaaagcgccctgttgcaggggcgctttttgattaagatgcatattgaggagatgtatcctcctttactgctttttcttcaggtatatgaatgcatttcgtcatgattgcactcgcaacgtaaaggaccgcaaagatccagacgacgccttgcgcaccgacgagaccgatgaacaaccaagcaagcgcgggaccgacaaacgctgataaacctgcagccaaattcaatacagacatggctgcccctttgtcttttccggccaccgtcggcacaattgccccgatcggcacatagcctgccagcaaacctccccaaataaagccgatcacactgacaaccgctacacttccgccggagaaaaccggtgcataatataataagacagtgaaaatgccgcagccgactccgccgaaccaaataacagtatttttccagccgaatttatcgccgacaataccaaagataagattaaacacaatgttccccagaaaaatcgttccccaaatttgcagccacacattggttgaaattccatgctgggccatgtgcatcggcaaaaagactggaaaaccatatgtaccaatgctgttgatgattctgatgattccgcctgtaaacacgcgcggatttgtaaataaaatcgtaaccccttttaaaagctcctcggctgtttctgatctttttcttttcttcttttcaaaacggtctttattgataaacaatgcaaagaatgcaccgagacatacccagaaaatagagctccaaagcgtattcaaataaccgaacgctttgatcgcgtagcttgagtaccaagcgccgaacacaaacatgccgaggcaatatgctatccaaaaccagccgacagcagtgctcagtttgctttgcggtgttctgtaaatgacccatgtcaagaaagaataagcaaaaagcgggtaacctaacccttttacgaagtaagtcacatacatcactggcaggttcagctgttcaaatccaaatacgataaaagcagctgtaccgatcacataaaacaacagccccataaacatcgttcgttttgcgccaaatgcttcgagacatacacccgaaaaccaggaagctatggcaagcgcaattccgtatatactaaaaatagaagcggactgctgaacggtgagcccgttttcgatcaaaaaaggactgagccagccttgttcaaggccatctcccatcataaacaaaacaacccctaaaaatccccaggcaagccgcttcggtattcctattttatccaacatatctgtctcctccttagatgcttatatccattaccgtattaccttattaaagttgaaaattaaatgattcctcaaaacagcaaaaatgctgccgccttaaatcaatactttgctttctgaacctgaaaaaaagcgctgtgtttgcttccatttctcatataaagccaattctgtctgacagtccttcggttcaatcacccggacatttgctgacatctcctccgttaattgaaaggtttcattgcaaatgactgcagcaccaacgacagatgcctgatgatatccctcttggacatagacctttttttgaagaagatccgcgatatattgagtgagcactttgctttggaatccccctccgcacacccaaacatagtcacgttcaaacggagtaacctctgttaaaatgtcaaagttccatttgattgaaaatgcgatttcttctagcgctgcacgtacaaaatgtgccctctttaaatgtgctgacagcggggcatcaaaaagaaaaccgcctctcgttaatgcattcttttcagccgataaataagagccgagagccgctacacatgcatagtcttcttttgcaagtgcagaaatctcctcctccattacttcgtacgtttcattcggataaaaaatctgttttaatttttgataattcaagccggtaattcccggattcgtttccacaagccaatgcccttgatctgtatgacagttcagccaggctttatgttttgtgtcgccatgatccgcagtaattttggttattggcgttgttgtccctgatacaatgacaatgtcctcaagtccagctccggtgcttttgacagccagctgtgtatccccgccccctgctataaccttagcatttattgaaaggcctaattcggatgcatattcatttgctatcgttccaattgctgttcccgctcttacaagaggcggaaggatagatggagaaaagccgaaaatgtcgcacatctcttctgaccaagtgttttgcttcacatcaaatagcagggtttctgttgcctgtgatggttcatatgttaatattccgctcagttggtacgtcacccaatcactgatgcttgtaaagcttgcagtcttttcccataaagagggctggcgctgttttaatccataaagcttgagcgcagaaaaaagtgcagttggcaggcggcctgtgcggctgtatatctcttcccgatcgggaatgcccgcctcccactctcggccgcgattatcgatgttcggcagcccgagaaaaggattgccgttttgatcaatcaaaacaatcccctgtctttggctcgtcgatgtcaaaccaatgatgtcaatatcacgcgaacgggatagcgcacgttttgccaaattcatcacctgcttccacagcacctgaggagaaaaataacggctgtccgggtaaagcgtctctgtggaatactcgatgtcctcccgttcaactgttagaacactgccagttacactcacgaccgctaccctcgcattgcctgtgccaatatcaaaaacgagatagcctttttgttttttcattctcttagcctcctttcttatacccctgttttcagttcgtccttgttatacattgtcggaatattaagagttttttcacccttccactttttgagggctttattcagtatcgtcacgtgatgatcctccacttcaaatgttgctccagcgagatgcggtgttgccagaacattaggcaatgaaatcaattcataatctgattcctctggaggttcatgataaaaaacgtctaatatcgcacctctgattttatgttcttttaatacagataaaagatcttcacggtttacaacaactgctcttgaagtattgacgaaaatcgcactctgtttcatcagatcaaaatgcttccgatcaataagtccaagtgtttcctcagtacgaggcagatgtacagaaacgatatcactgtctgaaaacaccgttttaagagatactttttcatacagcggatgatcgtcttgaatgtatggatcgtaatactttattttacagtcaaacgcagtcagcagttttgcaatcctttggccaaccgccccgaacccaatcatgccaaccgtttttcctgttaattcatttcctttaaatttgacataagcctgcaggtaatcactgttccactttccatccttcagccattgattcgaggcgctggtatggcgcagaaaggaaatcacatttccaataaacatttcagcaacggcttgtgcattccgccctggtgtataaaaaacaggtatgcctctttttgaggcagctgccacatccacattagagggcattcccctgcaaacaccgacaaatgaaagttcgggaacagaagcaaatacgctgtctgttacctgatcaagttcagtaatcaagcctgtcgcatttgttgcttttagcagctgaatgagttcatcttcccgatatgccctaccttgttccttccaagattgataagtaactgagccaaataagttttcaagctcttttcgtccttcttcgttgtacggtgctgtaaccaaaaccgtcatggtgcaaaacatccttttcattgtatttttcataaaaaaaatctctttccgaagatggaaagagattcatatataggcgcgctctgttacaggcagacgccggtataaaccttgctttcctatctttcaagctgacgcttgctggaattggcacaataatgttgccgaggtttcatagggccagtccctccacctctctggatagaaaatgttgagtatgtaattttcagaataaagaatacgtttatcataaagaagtctcagattgatgtcaatctcttttttcagaattgacgttatgatccgaaatgttataattcttacaaaatatctaactagagagaggaactgggccatgaaatcttttgccacacaacaaaacggcattttcaaatccgtttgctcgctggactgcccggatcagtgcggattgttaatacataaaaaagacgaaaaaatcgtaaaagtgcaaggagaccctgatcatcctgtcacagccggaaacatatgcaacaaagtccggaatatgacggagcgcatctatgatgaaaagcggctgactacaccgctcaaacgaacaggtgctaaaggccaagcgatatttgaaccgatttcctggaaagaggcaatcgatacgatcacctcccgctggaaacagctgattgatgaagagggagctgaaagcatacttccttacagcttttacggaaatatggggaaattgacagctgaaggaatggaccgccgctttttttaccgcatggggtcaagccagcttgaacggacgatttgcagcaaagcgggatctgaaggctataaatatacaatgggcataagcgcgggaatcgatcctgaggaaaccattcatacaaaactatttattttttggggaatcaacgcggtcagcacaaatatgcaccaaattacgatcgcccaaaaagcgcgaaaacaaggtgccaaaattgtcgtgatcgatgtgcataaaaatcaaacaggacgtctcgcagattggtttattccgataaagccgggaaccgacagtgcacttgctcttggcatcatgcacattttatttaaagaaaaccttcatgatgaagcatttctgtctgagtacacggttggctatgaagagctccgtgaacacgtgaaacaatatgatcctaaaaaggtatcgacgatcaccggtgtcagtaccgaagatatttaccgactggcaaaaatgtacggggaaacctccccttcttttatcagaatcggaaacggaccccagcatcacgataacggcgggatgattgtcaggacgattgcctgtcttccggcgatcaccggccaatggctgcacacagggggcggcgcaattaagcataacagcggaattttagaatataatacaaatgccttgcagcggcccgacttattgaaagggcgcaccccgaggtcgtttaatatgaatcagcttggcaaggtgcttttggaaacagacccgccgattcgctctctatttatttacggaacgaaccctgccgtcgtcgcacccgaagcaaacaaagtcagacagggcttgctgcgggaagacttgtttactgtggttcatgatttgtttttaacggaaacggctgcatatgcggacattgtactgcctgcaacatccgcttttgaaaatactgatttttacacctcctactggcaccattacattcagcttcagcagccggtgattgagagatatggggaaagcaagtctaacactgaggtgttccgattactggctgaagccatgggattcacagaccaggagcttaaagattcagatgaagtattaatccgccaggcgcttgaccatccagataatccgcatttggcagagattgattacgatgcactcactaagcattcatttatgaaagcaaaacgcgaaaagccgctgtttccgggcgaacttccaacgccaagcggaaaaatagaattatattcagaaaaaatgaaacaagacggcttcccggctttaccgacatatacacctcttgtaaccgataatgaacatccgtttatgtatgttccggggccaaaccataatttcttaaactcaacattttccaataatgaaaaacacatcaagcttgaaaagacgccaaagctctttatcaacacaaaagatgctgaagaacacggaatcgttgatggggcacctgtacgaatttggaacagccggggagaatgcgagctgaccgctgcagttggagaacaagtgctgccaggtgtcgttgtcagccaaggattatgggcggatgaacaaggaaaaaaacagcttgtaaacgcgctaaccccagacagattgtccgatatgggcggcggcgccacctttttttcaggacgcgtgcagattgaaaaagcataaacgaaaaaaccgcccagaacatgttctggcggtttttttttggttgataatgaaacccggagtatgccaagcccgtataacataacatcgacataatggaggcatgcatatggacgtttttttaggaatcggtattgctttggctggctattttatcggtgaaggcttaaagcagaggaaccaaaccaaaggtaatgaacaaaatgatatcttcctaataaaagaacgggatatttacttttacattggactttttttaggaataacaacgactgaagcaaaacagttagctggagacatggcagacctgccttacatcgaaataaacggaaaaaaatatgtccagaaacatatgttaaaagattggacattcacattagttgaaaaacatcagggtgaataaaacaaatctgaggagagcgagattcattgtcacgacgctctcctctgtttagctgtatggattgaccgccaccaaaactttgttctataagcgctgataaaacgataaaccaccatctatgttctttcctcaaacaactcaagatgcccgttccacaacaatagtttttatattcctttgatgacgtgatgttcttgatgaacgtatgtatcgtaaaacacttagaaaacctattcggtttgaatgtgtgctctcattatgcccccatactgcgcctttatccgcggaggatttttttaaaaaaatatgaaacctaaagcttttagatcctgaatttttattgaacctccatatttctccgattggtaaaaattagcctatacaccggaagctgtacgtttataaaggatcagagaatcccataaccagtaaatcactgcagccgcaatacttaacatataataaaagtacgattgcaatgtccatgctattgacgcaggttcattgataacaaaaaacaggaaagctgcgataaaagcaaccacactgtaaatcaataggtacatgacattgaatgttctcgcttttttctgcaacttcatttggagcggaacagcaaaaaggccatacaccacaaaaccgtataataaagcaattgctgccgtaaacaatgcaattatcatatcgccatacataacgaaagaataaaaccctaataacaaaccaaatgtaaggctggatagccctaatgtcattaaataatatgatgcgatttttttcattttttcaccccccttgtttgatttattcacagtgctgttagtataaattcacaacctttgtattaacaatgcgatgataaaaggtttcaaaaatacgactttttattaaataatacgactggcatgaaaatgcctctcctgattagccaaagcgcgaatgaaaaaaagtgaatgaatacctgatcaacagacaaaataagaagagttgatattcaacacttttcgtaaaggagtgaaaccaatgagtaagaaaggtattcaaaattcaagtattgaacaaataagaaatgaccatgagactgaaacagcttttaaagcagatgatcctaaaaaacacggttccgatcctaaaagaacgaaataagttcttacccccactaaaatatcaataatctggaggaagtaaagtgactcaaaaaaacggtgcagacagacctgatgattataaaagattttcttcattagacaaggaatatgattttcagcaatctatacgcagcaatactgagacagaaagtgtaaacactgaaacacaaactcataacaaagaaaacaaaaatgacacaacagatgttgccgggaaatactttgagccctcagattataaaggaagcacgcaattagaaaaaggattggctgaaactcatgaacaggtgagcgatgactattttgaagggacaatcgatcaaaatttggactagccatacaaacggagctacttaaaagaagtcagttagctccgtttgtagaaacaaccacagtaaaagtagccaacccccaccgaataagatgggggttgcacgtaagtagcctgtttaatagttaaaacgattaatgacggtttgaagttcttccgccaattgggatagagattctgcagcataggagatttcctccattgaatgaagctgctcctgtgaagattttgcaaccgcttctgtatttgctgacgtttcttttgtaccagcagccaatgtatgaactgtgtgctgaatcacttcaacgcctgatgtaagctgttgagttgccgctgcgacttcttgtatttgagaagtgacctgttccacgaggttcagtatttcattgaaatttcctgttgcctcttgagaaagaacaatacctgagctcacattttcttgaacaaccttaatattatttaccgtttctagcgattcattttggatggtcgctaccaccgattggatgtggtttgcagatttatttgtttcatccgccaacttccgaacttcttctgccaccacagcaaatccttttccttgctctccggctctggccgcctcgatcgctgcatttagtgccaacaaatttgtctgctctgaaatcgtcgtgataagcgaagagatatcgctgatttctgctgtgctcgctaccaatgtctgcaatccattgccggctgaatctacagatttatctatgaatttcatctgatctaacatcttgttgacggacttagagcctatttcagccttgtctctcatcgaagaagaaagatccgctatgttccctgtatttgaagcaactgatgatatactgtctaataattcagtgatggattctgcgctcttttctgtcattgagctttgcttcacattgctgtcggcagccatctgcatggctcgggaaatatgttcagatgttgatttcgattcttccgcgcttgccgataattcttcggaggaagcggcgacttgttcagatgagctgctgatctgcttcacaatttgagttaatgaatgagtaaaagaattaaacgattgggcaagctgaccaaattcatctttatttttcacaatgacttttttggttaaatcagcgtcgccatgagcaatttcctctagctgcttatttatgcttcttagtggcaccataatggactttaacagcattatgcttagaacaatgcctaatattactgatatccctgtgacaatgataatgagcgattgactcattttcccattgccctgtatttcatcctttagatcctctacctcttgatccaggcgatcagacagcttattgacagccggatctacgacttcttttcttaatgttctttcttctccaaaatggatggtttctgcttttttaggatttgaagagtaggctgttactacctgctgattcaaagctctatactgagtaaaacttgtcttaatgtcttcaatattggattgatacttctcttcatcaatcaagtcattaacccggtcaaggctctttaagacatcgtctgctttttccttcataccctcgtcgtattctttgtctccggtaatcaagaagcctctttcatcatttgataacccggtcaattcatattggatgtgttttatctctttttggaattccattttgtctttaagttcttcattctttttcacagtagaagaaatcataaatactgaggagcctccaattccaataattgaaacaactaatattgatataatccccagcaattttgttttcactttcatgtgtcgttttccctttccgcacaatgtaatggctgaaataaaatatgttcaagcgcgtttgaatccaattcgcttacgctcatgtccataatatcgacacgtgttatcaagttttatagtgctattttcatatgaataagctaattctttacggctctaaatcttcagaaaggcttcacgaaaaattgactgtcttttgtcgtataagtcactcttattctcattttctattaggcatacaaaaaaggcttttcccacctcaaattggctgaaccggctgttttctcgaaaatataatacaatacgcagcataatatgaaggagcgaaacttaaatggggatcatcaatggtaaagaattcattgaccgattgaataaactagaaaacgaaatatggtatgatggcgaaaaaataaagggtaacatttctgagcatcctgcatttaaaggaataatcaaaacaaaaagctcactttatgaattgcaaacaaaggatgagttaatacatgaaatgacttattgccttcctggagatcataatcgaatcggcctttcctatctccagcctaaaaccaaaaatgatttgaaaaaaagaaggaccatgattgaacattgggctagacatactcatggaatgatggggagaagtccggattacatgaatacggttatgatgagctttgcttcgtcagcggagcttctaaaagataaagagaattgctttcctgaacatatactagatatgtatgaacaagctgctaagcatgacctttcctttacccatacattcattactccgcaagtgaaccggtcacagtcctattttgggctaagtgaaaaaccgatatctgctaaagtcattgatagaaccgaaaaaggtttaatgattcatggcgcacgactgcttgcaacacaaggcgggttgaccgatgaaatcttggttttttcagcgcctaaatttttctttgaaacagatgaagcttatgctttttcaatcccttctaatacaaaaggcgtaaaattcatcacaagagaatcatttgtattaagcgactcttcctttaatcatcccttaagctcaaggtatgaagaaatggattcaattgtggtttttgatcatgtgttagtgccgtggaatcgtgtgtttttttacgataatgtggaagcagctaaagattttatgacaaaaagctcttttcatgcctttacctttcaccaggttgtcattaggcaaatgataaaaattgaatttctattaggtgttgcacagcttcttgtcgacaccattaatgtttccgaatatcagcacatccaagaaaagctctcagaaatcattgtgggattggaaacaatcaaagccctcattgacaaatcggaaaatgatgctcagttagatgaattcggctatatgcgcccctgtttaattcctcttcaagtcatcagtacgatcattcctaagctatatcctcgatttactgaaatcatacaattaattggagctagcggaatggtgacactgcctaccgaaaatgcatttgactcagagatacgggaagatcttgaccaatatcttcaagcaaccaatacaaatgctgaagaacgtgtgaaaattttccgtttggcatgggatttaacaatgagttcattcggaactagacaaactcactacgaaagatattttttcggagatcctattcggatttcaagcaggctgtataccagttatccaaagcaggagcagttgaacatgattaaaacatttttacatgcagatacagaacattgaaaaaacagcgggaaaagatccgctgtttcgtattttttattcaggaaactgaacatggcccggtactgtataggctttggacgttccgctttcaggcagctttggaatggtgtctttcacaacttttccgcggatgtcagtcattctgactttgagagagccagtacctaaattcgtactcacaaaatggttatagtccattttctccatgttgatccacttaccatccttttcatattccattttcataacaggatacttgtgatttctgacttggattgctgcccaccacctgctgctgccttctttgatccggtacgtgaaattgccggtgattggggctttgacaacacgccatttaatattgatttttccgtctttcatattgccgattttacggaaggcattaggtgacagatcaagagctccccgagcgccttcgggataaagatcagtaacatatacggttgttttcccttttggcccttcaacttccaaataagagccggcaagtgccgcttttactcctccgtaattgagatccgccggatttattgcagtaatctccatatcggaaggaatgggatccagcaggaaagctcctcctgaataacctgaccctgtatacgttgcataaccttcatgcaggtcgtcatatgctgccgaagcttgcggggaaaaacagaagatcgtcaacaaaaccataccaacaaatgcactcatgatctttttcatatttggtcctcctcaaaccagactccaaatgagaatcattatcattataagactcaatccatctggtttgaaagaggaaatagattcatagttgattttaaggcaaattcactatcattcatatatcaaatgtaggtacttatgaaaaagccaatacaaatgaacgaatgtgcacttcagccgaatgtcttatttttccctctcaaaattcgcatttcaataacgaaatgaaacaggctgttggcctgataacagctatacaggaaaagctatttttccccgctcagtttcaacttagctgtcatcatgatgccaaagatcagcacaatcggaacccaaataatgaagtgataaaaatcaggctcagccagagcaacaataatagcccctacacaatacaaaataatagccagtgctcttaacacagtatctcttaagaaagtcttcttttgcttcttaaaaaacaaacggccggatatatcctctaaaagagaagccaaagtgccggtcaacacagttgaagaaatacctgcaatccccagtttttttgctgctgtagtttgaatccccatagaaatgctcatgagtataattagaatgtgcacaggaacaaatgcccggtaaaaagaaagacaagcaaagacaaacaaaatgaatgcttcaagtgcgagggcttttgtcacagcagaaggccaaagggtattttccgcctttccgaccatcaatgtagcaatgatcacgccgcatataaatccgattagcgcagtcaaggaattaaaaacagtgacttgaatggatttgccgatagctaaccccaataatacaatgtttccagtcatattagctgtgaacacatgtcccaggcttaaatacccgattacatccacgattccagctgttaaacataaaagtgatagcaaggtgtttcgataagctgctgcagtcaacggtgtatcaatcctttcttctatttcaattgttagtatgtcttttggcgcaatctctattttttaagtaacccaacattaattaggaagatagaacctatcattcctttccattaactgtaataataatccccgcaaggaaatgattaaaattgaaaggaagcatattgtgatgaaacgactttgtttatggttcaccgtctttagcttgtttttggttctcttgcctggaaaagcattaggtgcagtcgattttccgaatacctcaacaaatggccttttaggttttgccggaaatgccaaaaatgaaaaaggcatctctaaaacgggcacaacgggtggaaaaaacgggcagattgtttacattcaaagcgtaaatgatttaaaaacccatctaggaggatccactccgaaaattttagtgcttcaaaatgatctttccgcatctgcgaaaacaacagttaccattggctcaaataaaacactcgtgggctcttacgcgaaaaaaacgctgaaaaatatttatttaacaacttcatcagcttctggaaatgtcatttttcaaaatttaacgtttgaacacagtccgcagattaacggaaataatgatatccagctttatttagattccggtatgaactattggattgatcacgtcacattctcaggtcatagctataatgcaagcggaagcgatttggacaaactcgtgtatatcggaaaatccgcagattatatcacgatcagcaactcaaaatttgcgaatcataaatacggtttgattttaggatacccggatgattctcagcatcaatatgacggctacccccacatgacaatcgccaataattattttgagaacttgtatgttagaggcccaggtctgatgagatacggttactttcatgttaaaaacaattacagcaataattttaaccaggcgattacaattgctacaaaagcaaaaatatattccgaatataattactttgggaaaggcagtgaaaaaggcggcatccttgacgacaagggcactggttatttcaaagacataggcagctatccatcactcaacaagcaaacctctccgctgacttcttggaatcccgggtcaaactatagctatcgtgtccaaacgccggaatatacaaaagaatttgtcacgaaatatgccggatcacaaagtacaactctggtatttggctactgatataaaagaggccctgcgttaaaaacgctgtgcctctttttatacttataggctatttttaagcgatccttgtaactccatcaagatccagcgtcggtcaaaccaaaaagcatatgtttttttccgcaataacttcttaaatggctttcttattataccagtttatcgcaagtaaaaagaaatcattgttctggtcctgtattaaatcaacgttcgtcccacacactattcaaaaacccctaaaaaggatgatggatatgtgcggcaggtttactttgtactctgcatttgatgatattattgaccagtttgacatcgatcaattttttcctaaaggtgaataccagccaagctataatgtcgcaccatcacaaaacatccttgcaatcatcaatgatggatcaaataatcgcttaggcaagcttagatggggacttattccaccttgggcaaaagatgaaaagatcggttataaaatgattaatgctcgagccgaaaccattaccgagaaaccggcctttcgaagaccgcttgtcagcaaacgctgcatcataccagcagacagtttttatgaatggaaacggcttgattccaaaaccaaaatcccaatgcggatcaaattgaaatcatctgctctttttgcgtttgctggcttatatgaaaagtggagcacacatcaaggataccctctttatacctgcaccatcataacaactgagcctaatgagttcatgaaagatatacacgaccgaatgccggttatattggcccatgatcatgaaaaggagtggcttaacccccaaaatacaagccctgattatctgcaaagtttgctgctgccttatgatgctgatgacatggaagcataccaggtttcatcattagtaaattcacctaaaaataattcagctgagcttcttgatgcagaaaatcatatgtagtgattgaaattctctagcaagaacttgtcaatagctttgttccttaggtgccaatccctctagtaattatgaatatttagtacatagatcaattagttttcgatatcagttcgaaataattttattatgtaaacttaaataagcaatgttatccctttcatataaaatagtttacatttttataaagtcgcttcacctttctattttgtcagcaaaaaaactgaaccacattaaacttatgaaacctgccgcacctgtgattgcaaatatgatataagcccatagaggtaaatccatacactttccatcctaagaattaaatgaaatttctttcatcttacatgaaggtcttctttcttttgtttatccagtgtaatacttaataatatgttgatgaatgcagctggaaaatatataaatcccactccaagaatgcctagtatcgtacttaaacttactatgtaattctttgtcatcgtttgactgtcaatcaatattagaagtgaaatcaatccagctaaaacacctataaaccaagcatcgccaacagcataagaatcatccagcatccctaaacatcgccccaatatagagctcccaatggcagtcaaactggataaaaatatgagtgctttcatttcttctcctcctttaaagccaatcaaactggtagaaatcggccattgaattcccattatcgaatggttatcatttccacattaacattttaaagctcattacaatacgattcaagcagaaaaaccctacataacgtatatatagggatttaataaaacacaggccaaaattcagctctatctactttaaaaagatatgaagggcagctgtgtgatctgttacgtctttacgtaccgagatatttcacaacaggcactttcttcttgcgcagagaatcaagcatgactgatccagcattcaagttgctttgtactaattctttaggcgtcaatgccatccactgattgagtgacacatctgcatagcggttacttttgaacatttctaaaaaccataatgtttctgtaccagtgttttgtatatagtgtccggcattagaaggcacgtatccaacgtcgcctgctctataatcaaatgtgcgggcagtcccatttccgataaataccgtcattcgtccctgtcctgttagataatattgccactcatcgctattgggatgccaatgaagctctctcatcgcgccaggctcaatctgaacaagtgcagcggctatcgtttttgaaattgggaagttagaagaatccacaattcgtacactcccccctggcatttgaattgggggttgatttaacagctcgtgtttaaaggtcatggggacttttccatatggtgactgaatgtcttcactggcgactgatcccggcacattcccttggtagatatagacttgctcagacggaagagagttgaaagcattctccgggacaccgaaatttgcagacagaacatcttttggtgtgtgtgcaagccaatctgaaatggttaacgttgaaaactcagaaaagttcccatcatcgaaaacgagcagaaactcgcagtgttccaatccctgtatggaatgcggaattcctgccgggaagtaccaaaggtcgccgggaccaacatcagcaatgaaatttcgtccgtcttggtcaacagcggtgatacgtgcccgtcccaaaagcatataagcccactccgcttgcttatgccaatgaagctcgcggacgcctcccgcagttaagctcatgtttacacctgcaatcgcagtcgaaatcggaagctgtcttacggtgatttctcttgaccagccgccgtgatctaatttcatgggagcgtctgagaatgaaaatctcaagttaggaatcataccctcatctgtaacaggcggaacaaatatattcggattttgaatatcccgtattatatttcgcgggcctgtatcaatagctccagctccatcacttcgaataggctgcggcacgtttctgtcttcatgattgattggttgttgttccaacagcatgcacctcgttttagaaatgaacaagattttatttcagcctatgcagaatcttagattgctgtgcctaggaatccgcaaataaaaaagtgaccaccaatgtgatcacaaatacatcaaataaactattttttataccatggcttcttatgtaatttgattgcttctgtctgttttttctggcctgtcctccactccacttttactaatacatcatgtcctatcacttcatcttcaggcatataatcaaaggtggaaatatggtcctccatgcgtcccccacccggcatttcatcacctgtgtactctgataagtcgtactcatctacgttatcatcttgatacttttcgccatctacatacagagtaattctttcaacaacagtccacttttcttccttcttactcccctgccaatatagatttagaaaataattgggtccaattgaagttttgtctgatttttcaaggttagacatccacagtccgcttttcccgctgccctcatatttcactttgtttcctgacaccattacaaataatgtgatgatgcagatgatcaagaatccagcaatgatcaatagccatttcttaatattgttcttttttctcatgtttttcctcactttcctaactttttagtaggaaaatacgatcaaaatgttaccgaaaagaaaataaaaaagggctaatgatctaacagatgactgtctaaacttttgacttaaattaaagtgctctctaaagacaagattaaaacgtataacagctcttaaatgcattttttgtttcattgagtcaagaaccttaaaatggctttttattattaaaaatcaagctagtgtattaagtaacttttcaaatttatttatactcatgatctcgtgagtcacaaatcttccatcaaaaaaaacgctaaaagttgtccaaatagctggtgacttttgtgcctcttctttcgatgataactgaattgactgaaattgaacccctttcttttcagtcaattcccgcaaatcatttatcatgcccactgcaaacggacactgagctgtatagtatatcgtaatccccttttcattgatagaatcacttttcacctggctcttaaatgcaggagaagctgcaaggccattccaagtcaaagccattaattgaaaataaggggcagcttcatcttgtagagtaaaccccatatgctcaaagaaatgcttatcacttaaatagggcagttttttcttgcctgcgatatggataatgccatccatgccgcacgctttcgcatctgctatacatttgtccaacaatcgtttcgcatgaccgttatttttatatctgccagacacccacagacaattaatgtacataaaattaggcgcattgataggcacccatgcctcattcgcaggtaggtattcaataaagacttttgcccgttcatgtaagcgatagaacaccaatccttcatccattcgagctttgagccatctcttcttttcattaactgcatgctcatattgtttcgtgcctaatgcacagcaaatatgattgtcttcaatattgtcctttgtgatttcaatgtagcacatctcctcttttccccctttaacataattacatggaattcaacttcacactttacatgcctaatagaataaatacccgttccaacttaaatactttttcttttccattttgtcaattaactgtaaaactcttcttttattcagatattatcttgattcctatatcacccatttcaaatccaaagtgtgttcatctttgaggattagatgcactgcttatgctataaatacagtacacgaagttttttatttgaagtaatatttgttacgggacagcaatagtaaataagtgataaaaggggaattaaacttggtggaaaaatgttattcttgtttaatttgcagatacaaaggattatttcaaaatcctttgtataaaggcgattatcaaaaaacgtttgacatttgtccatgttgcggttttgaatttggctacagtgaggatcatgatgtgaggttaggttttattgtaactcctgatcatttaattgaggctgcatttcaattgtatcgcaaacaatggattgagagcgggatggtaattgctcatccggaagatattccagaagaattgaaaaatggcaattgcttaaaatttgaagttttgttgaaacaattgaaaaaactaaatcttgacatagaaaattttgaaattagcggtttttaatgatgaaacaggttgcacttgtttaggtttcactgtcattatcagtaaaatgttaagttgaaatgcgcagtcagtcacaaagtctctattcgtattcaataaagactttgtgatcatcgacaaacatttcactcccatcggataaagtatccaaaaggcctcctctggttcttctctatagtcattaatcacagtcactttgacatttgactcagctatgattggttttccaacaatttttcgttttttcctcaggcaaagtaagagatcgaatcatcaaagccattccatctttactgtctaattaatgccatcttcagtgaatttaaaggtctgttttaaattgcgtccttcttgccccttctgtgtccaaattataacaacctctaattcagaggccttatctgccagcataaaatgattgaacttcagcggtgagccatcatttaaactttcagctaacattttagaatcttcttttggtttgacacaattttcatcgggacatccaaaaagcgaaaaccttgtgattgaattagggtcatttctatacaattgcacatccactgtagctgctttttcccctatatttttgacttccaaggaatatacttgatattctcctttttgaggtctcgtaaattcctttacattttttgcttcacttacttttactgaccactgttctgttttttgtgtaataggcaacaccgtaaaagtcagggcatgcgcttttgattggcaaaacgtaaatccaactgctgtaaaaacaattacagaaaataatacccttttcacttcatttatccctccttcctttcactggccgctccttaaagaattgattttgagcaatctacaagctctcttaaccaaaaccttacctgaggttttgtctttactgctctgcatttatttctttcggtatccgagaaggagctttggggatttttctcaatctgctgttaatcacatcagaagagtatagcgtaataatcatacttctcccatacctttttgcccgaattaagattggttggttatattggttttgaaagcgaaagtcaggacctccccagcttaccgtcgcatcccgtccgggcggtacatatggtacacttctagtatgagaatagcgctgaacgatctgcagtcctgcacgatctactgcattaaatagagttgaggacacctgacaaattcctcctcctacaccttcagacaactctccttttacaataatgggtgcacttttatatcctttgttccgagttctcattcccacaacttggttaaacgaaaacgtctcattagggaaaacaacgtgattgtcgattgcttttgcagaaagagaaatattgtgtgaacggcttttattgcttgagttaaaatacgtcacgtactgaccaagctgctgcgtactgatgtgagctagcagctcgctgtcaactttcggataaatgttcatttccggcacttctatcttggagggaccttgcccataaaaatacgcataaaacttttccataaacgcctgttgatacagtttgtagccaaccctgcccgggacgatgcttccatgatcgttaaggacagcatttatcggctcacggtacactttctgatcaagctgtttgatgaatttactgtatttttcatagtcaaccattggagtgccgggaagaggcattgtaaagtcttcacggttaacagtggcaatcgtccgtccttgctgtgtgaccgttaaactgtcctgcggctcactcggctgagccaataaaaaaagaccagtgatcaaaatttgtatcataagtcggtttacctcccaatcattagtatgaacagccgcttatcctttgatgtatttcttcccatcgtttgtttgaatctttagacgttgataaaaaccttcataaaagagcttagctttatgttcacaccgatccctgagctcactgaggcacacggttcattcagtcggcaagtttgaagtagttcagcatctcccagtgatgagggatgcttttttgtcttgtcaaaaatgaaaagggtctcctataacaacaaaaaatcaatccatttcaatatttttttattgagaaacgataaattttttgttacattcaattagacaacaaataaatgaggtgcttgttatgaatcgaatgtcgacaatttttttaaagatagctttggttcttattggaattccaattcttgctttatgcatttttttagtgcctaaggtagccaactattcagcagaattatttccaaatatcgcttatataaaatatctcgttttcatctatttgtatgtaacggcgatacctttttactttgctctttatcaagcgttcaaacttttaagctatattgacaaaaacaaagctttctcgggtttgtctgtaagagctttgaagaatataaaatattgcgcagtcactatcagtatcttttacgcagcaggcatgcctgtcttttatctgatggccgagatagacgacgccccgggtatcattgtgatcggattggttattatttttgcttcaatggtgattgcggtctttgctgctgttcttcaaaaactgttaaaagaagcgattgatataaaatcagaaaatgacttaacggtctgaggtgatgacatggcgattattatcaacattgatgtgatgcttgctaagaggaaaatgagcgtaacagagctttcagagagagttggcatcaccatggctaatctttcgatattaaaaaacggaaaagcaaaggctattcgattatcaactttagaagcgatttgcaaggctttagaatgtcagcccggggatatattggaataccgaagtgatgaagacacaggattcgtaaagaaaaaatatgaaggatcaacagaaaaataaagtgattggcggtgagcttatggacataaacttatatccatctagctgctatactaagcgtccctttcatacacgaagaacacaactatggaggaggcatacatcatgagagccataaaacaaatcgttcattttggctgggaacaagccctttcatgtttgtttcctgccgttatttttgcctctttggctattacgcaaatcatcccactgcccttcttgccgcggtatgactggctgctcattatctgcgttctcatgcaattgtggatggtgcgttccggtcttgagacacgggatgaattaaaagtgatcacattattccaccttattgggcttgctctggaactttttaaagtccatatgggctcctggtcttatccagaagaaggatactccaaaatatttggagtacctttgtatagcggctttatgtacgcaagtgtagccagttatttgtgccaggcatggagaaggcttaatgttgaactggttaagtggccgcctttttttgcagttgttccgcttgccacagcgatttatttgaattttttcacccaccatttttctatagactttcgatggtggttatctgggcttgtcatcattgtcttttggcaaacatgggttacatacgaggtgaatggagctcgttaccgtatgccgctcgcactttcttttgtactcatcggattttttatatggatagcggaaaatatcgctacgttttttggagcttggaaatatccaaaccaaatcgatacatggagtctcgtacaccttggaaaggtaagttcatggctcttgctagtgattgttagctttcttatagtagcatcattaaaacaagttaaggagcagagtcccacaaaggcagagatggatgaatctttttcttagcatacaaggtcccaaatagagtgaaaagcaacgttcaaatggttgcttttttcttttatgtaactctgccggtgagtattcatcttcttcaaatttcatcgcaccacgataactgattcagattacaactgctttcaacacattgataaactcatgcgccgccggcgttatctcttcaaatgaatgtacgatgacgccaatatcgcgtgtgaccctaggaaagatgtcctttttaatcaattgatgcgggacggatgaaagtgtaaagtttgaaatgatgccgatacccaagttatttttgaccatattaatcaaggtttcggcattttgcacagttaagttttcctttaattcgatgttgtattgcgaaaatgcgtttgacatcgcgatttcatgaccgcctttacaaaaaatgaggtcatcttgatatgtttcaaggtcgacatgcttttcaagttttaattcgtcacgctgcggcgggatgacggccaccatatagtcgttacacaatagctgattttcaaacggttcaaatggagatgctgcgattccgatatcaaccgtccgatcctcaacccatccttttatttggtcagaggttccttcgatcaattctatgcggatcagcgggtagtttgatctgaatgcagcaatcgcctgtggcatgatatttgttgaaactgcaggaaatgaaccgattttcaccttcccgtttaacagcttgttttcccggttggctacttgatatattttgctttcaattcccttcatttgcctcgcaagcagcaatatttcttttccgatgtcagtcagcattaaaccatgatgtttatccctgatcaataatttgagctgcagtgagctctccaggttttttatcgctttgcttaccgccggctgagagatgaacaattcttttgccgcttctgtaatattcaatttctccccgacttttacaaatatgtgaagatggttcatattcataaccatttggttatacccccaataataaaaatgtatttcagttatacataaatgtaacatatgatagaaaccagcacgatatttaaacaagaaaggcggcttcattatggtaaaagttatgctgggaatcatatctgtcacacttatttggggttatacttgggttgcgatgaaagtaggaattcatgacatccccccgcttttattttcgggtttgcgcctgttcatcggagcagttcctttatttctcattctcttcatccaaagaaaaaagctttcaataaaaaaagaacatctcaaaagctatatcatcatgagcctgttgatggggctgggctatatggggattttgacgtatggaatgcagtttgtcgattcagggaaaacctctgttttggtatatacaatgcctatatttgttacggtgatcagccatttttcattaaacgagaaaatgaatgtgtatagaacgatgggactggtctgtggcctcttcggactgttatttatatttggaaaggaaatgctcaatatcgaacaaagcgctttatttggggagctgtgcgtacttgcggcagcgcttagctggggaatcgcgaatgtgttcagcaagctacaattcaagcatatcgatattattcacatgaatgcctggcaccttatgatgggagccgtcatgttattggtgttttcctttatatttgagccggtcccttcagccgagtggacatatcaggcggtgtggtcattgctgtttaatggcttgctttccaccggctttacctttgtcgtatggttttgggtgctcaatcaaatccaagcgtcaaaagcatccatggcattaatgtttgttcccgtattagccctattctttggatggctgcaattgcacgaacagatcaccatcaatattatcctcggcgcactgctgatatgctgcgggatttttatgaatacatttacattttcacgacggaaagtgtgaatgatatacatttcccctgtcatttgggcttcatgtgacaggagacgactattacgagaaagtcttctagaatcctgacgacagcctattaaacaatgaaaaaagctaatgtctgcatgtagacattagcttggctggcgtttaggctggtgagaatccagatacttttttattaccattctggctgatcaaactgaaaaccgtatagaccttttactttaacatctccgcaatctggatcttttgtcaaaatcaaataatgagtcttataaggcatcgtctcaactcgatcagttgcactcaaatcaaaatgatcccctgagaagtttttttcactaacggttatttcatatcctgacaaagtcattcgcatgattcttgcgttaattgtacatccttcagtatcgaaaatggtgaatctgtacccaaagtgagatgtccaatggtttgaatttaggtcatcagacttcataaaccatttttcattttctgtcattgtaaaactcactttctcctcatctttcacgataacagccgaagcttcccctacatggatagtcaaagccaaaagaaatgtaaaagctaacatcaacatctttttcaaaagagttcctcccgatatctttttacttcaatttattggaagggtcttttctgatcaagacagtcttctccaaatgaatctttagcatcatgaaatgagccttaataagaacagttttaacccaaatcaaactctattcgaaataaggcttaccaatctatattctttttaaaagtttctgcatttctttatatagctcctagacacatataaaaaatgctcccataagttcaggagcactacaaaaaactgctaaagtgttttctatcgatttattgtattcattagctcaaagaagtattcaggcttataagtcttattcagcttataccatgaacgcaatgtatctggtgcaaatacttctaattttttcaatacttctaccgcaaattccagaggagcaattcctgatgcagtaaccaaattttcatcagatactgcaggttccttttcatatagtgtttctcctttgtaattagggcagaccattttcatatactctaggtcattgcttgtgtgctttctcgaatttaagtatccttcattcgcgaggcccaaggttgcaccacaaatcgcagcaatagtcgtgccaagctttaaagcgtcgccaacttttttcaagatcggctgatgaatatcttctccccaagtgtttcctccgggtaaaatgataagatcttgactctcaagagtacactcatcaagagaaatatctggttttatgcttaatccgcccaacgtagttatcatttctttattagcccctactgtaactacttttaaagatgctgcatcctgtttaaaatatctccctgagtttagttcagcaattaaatatccatattcccagtctgacattgtgtgaaatacgtagagataaacttttctcgtttgcatccaataacactccaatcacaattgataaagctttctaatagatgactttgctgacagccattgtcagcatatgtattctgatttgcctattcttatataataccatgtaggtgggcaattgcccttgttctcccaacttattaaaaatataagataaattgattctatgtttactagcgcaaaggggtttgttacactaactgtcatgggaaacatttcaaaggtaatataaaatcatttgaatgaggaggcctgatgaagttgaaaaataaagcgtcaataaaattcggaatatgtgttgggcttttatgtttaagcattactggtttcacacctttttacagctcaacacatgccgaagcaaaatccatagaagacacaaacatggcaagctgtataacgaataaaaaatttgttcaacttgagaaaaaatttgatgccaggcttggtgtttatgccattgatacaggttcaaacaagacaatcgcctatcggtcgaatgagcgatttgcttacgcatcaacctataaagttctagccgcagctgctgtcctgaagaaaaactcaattgaaaaacttaatgaagtcatccactacagcaaggacgatcttgttacatattctccaatcacagagaaacacctagatacaggcatgagcctaaatgaaatctcggaagcggctatccgttacagcgataataccgctgggaacatcttgttgcaacagcttggcggccctaaaggttttgaaaagtcactgaaacagattggggatcatgtaacgaaagctaaacgattcgagacggatctaaactctgcgattcctggtgatattcgtgacaccagcaccgcaaaagcactagcaaccgatcttaaagctttcactttagataacacgctcacgactgacaaacgcacgatcttaaccgattggatgcgaggcaatgctactggtgacgaactgattcgggcaggcgctccaataggatgggaagtcggcgataaatctggagccggaagttacgggacacgaaacgacattgctatcgtttggccgcctaacagagctcctattgttttggcaattctgtcaaaccgctttacgaaagatactaattatgataatgctcttatcgctgaggctgcaaaagtcgtccttaacgatctcaaataatatgtttagccttttgccacaaaggaaaagacattacttttttaactcctaccgttcattttttgatgaacggttctttcataagacctctagaatcatatatttaaacaccacaaaattaaacgttattatatttaacggcaagttttcattttatggaacaagtaaagtttgaatctgacaagaattaaggctaagcaccctaaaatccgttttctttccttccaagaatatactccttagtgcaagccattataaagaagtgaacatacaatgcagacaactcccttaagtctcttattctgtgaccaatttgtaatactcatgaatatccggactcacttccaatatttcgtctcgaagacactaacatatcaaaccacttgaattaacataactgaacttgatattggtcactggcagtttcaatgcaatagaacaacatttgttgactcagaggttatctatatgagaattcaacaatttttttataataattcatatttttgtatcgttgcacttggtggatttgactcttttaatgtatggaaccacacttttattttttcacctcttttgagatcatctgtgttatcaatctcacttaatcctacaattactatgttatttttaaacttgttcataagttgtccttcagaaagatcgtaatcttcttttactggagcttttgtatcggtaatgagaattgccctttcattgtctttaagcacgacatagcctactaggctctgcatctttgtttcttctccgtgttgttcatttttgcagcctgcaaggaaaataatgagcactatcaagcttactccgattttaggcaactttctccctcccgtaatgttaaacaatctcactccataactacatatcaataaactgtagtgtaaatctatccagaaacttcttcattttctcatattgaatcttttacaagctgttaatacacagactaaatcgggtaaaaattcgtagaggtgatttctttgaatgatgatcattaagtaactcattactcttcatttattttttcaacaatcatggtattggcggtcgccatctttccacaatacacttcttggtttgtaacagttttcttcttgagttttgcacttatctatacattccaaatacatcaaacaagttcttcaaaagcaatatcttatatttcgtattttttattcattgtttcattgacttacactttagttaatatgtaatagtaatcctccctttgtgggaggattatttgtttaagcttatttctaggctgcttttgggccacctctatctataatgataaaactatctgaaccatttttttcttccgatctttgtcttcgtaaatagcaacattttggcgtgtcattaatgtaataccggccattttaaactctttttgatctttaaaataaacaacagggacattcaccaaacggatctacttctttttgttctttctcaaatgtttgtatgtggttgtcttcgaaccatacccttactcttattccgctaaaatcgagatttttactttttatgatccattattctctttcaaaataacttccaactacaacataatatatgtataaattgtaaatggagttgatgtaattgaagattaggaaaatcttattgagttctgctttatcctttggcatgctcatatccacggttcccgcattggctgctggcacttcgtctgaggttgcagtaaaaagtggtgaatatgattatgacactatataccgcattagtcctcttccaatggacttccagccaacaatagaatacaacggttatacttatacgcttacacgacattattttgattactcaatcgggttttacacggctatttatacaaaagttgtttaaatttataaaggagctttttagctcctttttctcttgttttaagcacaaatacaagtttaaatgctggtaataaaaaattcactttaaagaagcgccgcccgcaaaatgcggcttttgcacactacgccaattttatatagaaaagccagacctcctccaagaggttccagcttttcttaatgtgctatcgatcttcgttagttcaacgggaacttaatcattcggtacaaatgcagcctcccacttctagttagggctgatggcggaatatctgatggctctctacacatcagacattataagatttcaatgtagccttctgtaccatgaacgcgaattcgttgcccatcttttatcagcttggcagcattttcaacgccaacaactgcaggtaagccatattcacgggctataacagctccatgggtcatcagtcccccaacttcggtgactaggccttttatggatacaaacaatggtgtccagcttggatcggtaaaggaggtaactaatatatctccatcttctaaatcagcatcttccatgtttaaaatgacacgcgctcgcccctctatcactccggaggaaacaggtagacctacaatcgctccggctgggagattttctcgtttatactcacctgtaacgatttcaccatcagacgtgataacacgtggtggagatagtttttcatataatgtgtactcggcttttcgtgcgctgatgatttgataatccagtttatgtgtgcgtacgacttcgtgaagttcttcaaaagtgagatagtatatatcttctttttcatgaataacgcccgcttctatgagttgttcggcttctttcagtaaagcctgcttataaacgaagtaccgattaaccatgccgtattttggatattccctaaacccgctgaaattccggatgatatctatcattcgttttgtttctttggctttttgttcaccatccggtaattgcttcaatcgatctaataactcttgttctttcttcaaagcttcctgtcgcccttgctcaaatttccgatggctggcattaggctcactgttattgatattattaagaatcattgggataagtgtagttggtttttcgctccatcgagttcttgtaatatcaatttctccggtacatcgcattccgtatttgctgagataatcatagatcgcgtctcgggttttgcttccgccatcaaacttagccagttcatccaaaaaattatcatcttttacatgttgtaagtaatcaattacctctggataaggacgaatcacatctgcgacgtctaatagcgcaagacccatttctgaagtaatattatggggtacagattgagaaagcgtatctgctgcgtttttttcacctaaccactcgttcattttttcgttaatccataatgaagcattcatagcagttcgaatcacaacagaactttctgagttaaataaaatcttctttaattcctggatatcttccagaataaaacgaaataaatctgatcctgatttcgtttggatgttttgttttaactcttctatcgatgtttgactgctctcaatcaaatcagacacgattgtcggatcgttttcaacttgagccggcatatctgcattgcctctgctgggatttggtgctgttttatcatttggtatcgactttatgaaatctcgtcgccttattatggtcataagtgcgtcttttaagagctgatcgtgctgccccatgccttttaagaaaacttctctgctgtcaggggatgccagatgatgtgtgacatcaacaaatagccttccaccggctttacgcatgggtgcagcagtcgtcaacagaaaaaaagacaatcctagtggttttatgggatccgtcatcatttgttgatgaccaacagaaatatagacgtgattttcttggtcactcgcttcagggatggggaataaagtagtgattggacgactctgtacaatataaaaagtatcgcgggccaaacaccattcgatatcttgcggctggccgaaatgagcttcgatctgtcttccaatgcgttccagctgtaaaatttgttcatcagtcagtgtttgagccttttgctgatcagaatcgatctgatgtgtttctgttccgccttcttttcgtccgtagatagccaattttttagttgctattctcttatcgatgatttgcccatcctgtactttataacaatcggcagataccaatccggaaaccagtgcttcaccaagtccaaaaccggcatctatggataacacctttcggttggaggtaatcggatcagcggtaaataaaatccctgaagcctgaggaaaaaccatcctttgaacgataacggataaataaacttggctgtggccaaatccattttgcatacggtaaataaccgcgcgatccgtaaatagggacgcccagcatttactgatatgctgcaagattgcatcgacgccgataatatttaaataggtgtcttgttgaccggcaaaagaagcatgtggtaaatcttcagcagttgcactagaacgcacggcataggcatgttcctcgccgaactgggagagatagtgagccactgctttcacaacatcggaaggaatgtctacttccataatgatttgccgaatcttccggctgatgttaccaatctgatctcggtcctcaacttttagcatcgccaactgatccaacaacacttgtaacgtttcgttttgttcgatggcttttagatatcctactgttgtgacacaaaatccttctggtacttgtataccttgaatttttgataattcccctaaatgtaacccttttcctccaacgagcgaaaactgtgttttttcaatttcatgtaaaccgagaaccaaagaactcattctacatctccccttcaaaaaaatattgacaagagcttcctagcaggatataataaaattataagatggatatctataaccttttaaccagaaagcgcacgtagtgtgattatatcaccgtgtctgtttttgtgcaatataaaaagaacctgggcaatttcaccaggttctttcttaatttacataactagtcacattaaaaaacttggttcgatctgatacaatcctctaagggtatcctaaagttgggttcttttcgaactagtctgtcttgttccgtagagtccccatttatgaattagactttttgttcttaacagtcccaccgttaactagtataaagttatgaggatctggttaactactgagatatttttattttgagtaaggcttatgtttgataaagaagggttatgtaaaggtgtctgttgtgagcaagcgctgactacaaaaaattgatagcattctcatttaaataccattctattaacctatagaaaaagttataaaaccagatggagaatatcctacctccagtaattccaaggccgttcacctagtagaaaacaacctttaaccattactaacgattttaataatcattgattataaaacttctcaaggaacgatcatcagcccgttagctacccctgattaaagatgatctgctaccacactgttacgttagaacttccactactttgatatccttctgtcgccatgacttggtaagcccaattactgcccagattcattccatggctcttccatgcgttcacatgattgctgaaagtgattgtagcgttgcttccggttggtctcttcgtctgacgaacactccagtactgcgtaaaagtagtgcgatcgccatcaatggaaggtgcgttataacgtgtagttgtatatatgtcatatgtacccccatcactttttacagtacctttatacgttccggtaggcctataagtaccccatgaatccaccacataatattctatgaggggcgatctcgtccaaccatataaagttaaatatccattgccattcggtgcccaaactccggcattatagtttatcgtcctaaatggcgaacctgtagtccaacctttaccaacaacaaaatttccggtattagaccaattaacactgtaattcccgccagacccattgacagcgtttactataccgcccccatcagtccaattttgccagtagtctgtgctagctgcagaggcggttgccgaaaacaagctaatactcattaaagctgccgataatccaactaagaaattctttttaaacttaaacatatgttacctcctataatattttttccgactttgaggtagcactcgtatacatttaaaacattcttaattactaacgccaatgcttttgatcgtccccttcagtataataacacgaattcacgagtgaatattaaaagtatttgtaatttaattacaaatacctagaaacacattataagtggtcttcttccaccatatcctgatccttttttcgtaggatcacaattcttgtttctaattcagatggagtaatatctgcaatgaattcccattgaaccatttcaaataaaggagatacacattagagattgtgaaattattgtagctgccgcttgtctaatgaagggaagcaaatttatgaagaatatgaagaactgaagaagaaaacaattaaggttatactaagaaagaactgctcaattagaattattgaccaaaaatttgaggatgatagcttagatcagttttacaaagaagttgcaagatttttatttgaaaggactctgaaaaagaaaaaaagaattgacaatcagggtaactgtgggatgtaaccgagcctccaattcaaaataaaaatctttaaaattcttattttatttaaagagggactgtatatccctctttaaaattaagctttagattgctgctgaaagtaataaaaattgtacttttgatcaaacccttcttcgctaccacaaagaaaaataatgaattcaataaatgcgataatagaggggataccagtccagcaaaacaaaatatatagaataccttgtcctactcttcccaaataaaacttatgtattcccagacccccgaagaaaaatgctaataatgccgctacaattttgttcttcttgcttaccatgacttcctcctagctcattgctgccatttttaaaataatgctttcacattataatgcattttccaccagaaatcgcgaaaatttagaaattcttttgagatttttttatttaattgagaaatgaaagctcatataattgaactagatggttttgggaggtgtttattcaaaatgtatggcaaaagattacgtcaattacgaaaggcacacaaattaacaatggaacagttaggcgagaaaattggaattgcaaaatcaagttacggcgggtatgaagctgaaagcaaaaaaccaccattggacaagttgattattttagctaaactatacgatgtttcagttgattacatacttgggttaacagatgatcctgatcctaaaatggaaagaaaaaacctaaaagagtttttagaaaaaccagatattcactgggatggatataaacttacccctgagatgttagatcctatacggaaaattttgaagttggttactgcaaacaacaattaaaaagagcccttatgtgggcatttgcataaaacaattattttatctaaatctaaaaatttggattccaagcaaattcaatgttaccttctgttcttacgactaaatctttgcttaatctctctttgttaaccttatattctttgcagcttaaatattgagcttgtgcaatgaagttatcattacttgacattatgtatcttttgcgatcacttttccttccatactctttaaaaatatccataaatataacatctgctggcatcttaccatactttttatcatgcgttatctctggaaagttttctaaatgtctaaccttgtctatgattcgtacaatttccttcttcacatgacttctacgctttgaattcttcatgtagatctcaattttaaaacgttttaaattgtttgtacttgtgtctctgatatttttaacgatatactcttcttccttaatatcgtgataatgacaatgcaaagtataaattccgctaactgtatcatcatcttgaaaattcgcaccaaaaagactattcctacttattttatcaactaagtattgggcatctataccgttttgaatatatgcaataatatcagctgtatcagttaataagaaagaattaatttgtttgtcgttattaaatgtaaggaaaagcctatcggactcaggatacaacataactaatttaacaaaggtaaatataccaaactgaatcaattcattattagaaggaacttcatatgtagaaaaatagaggttgacttggttgtttatttcatccacattcaaaagattacatcttaaattataagttgacatctcgagttttatccaggattgataaacaatatcggttgtattcgaacaaattgactgagcaatgctcttataattctttacattaaattttacaataccggctagcaatccgttaaccagatcaattattttatatatctgtctcttaaattgagaaacacttacttccttacttttaggttttcctctgttagtgaagttaaagataattttatctttctcttttagataagttcccccatggttaatagcatttctaatatctacatcaatttcctttgttaaaattgtacacccttttgaattaagcaaattgactaaagggcctagattattttgacttaacaagtctttatcatctatggtgttaagcaaattcctcaaaaatttatatagattgctaactactccttcaactaacgaattatataaaggcaaatacttgacttgaatttcagtgtctctcggaattatagttttattaaataaattcaatgtactcagtacacgatcatatgatgaaagggctaaaaaaagttgtctagactgtctctgaagttctcaaaaaacaaatcagtgttaacgttcttgcattttacttcatcaattaagttgtaaataaaatctttaatatctttattccaaaactgtttctcctcatcaaatattaaatcataaattaacggaagccatgtcttaggtatatattgtatcccctcaatattttggtctattctctctttgtacaccttcataactaattcactatcaaaccccatgaaatctaatgatccaaatgcagcttcaacgtaatcactgttcaattattccctctcctagctcctcatttaataaaaggattcttttatcttaatagatgttaaatttacactctccccatctatttttaactgtctcactttctaattttaatttgaatatagctttaatagttcttccactggataactatctgttttatttatctctataaaatattctaactgccaattttgggttttaatagcttgtttgctagtgggattctcccatctagggtaaactcgaattgccatttttccttttgtgtcggatgttttaaggatattttgttttacaagaacttcttttggaaagacaaattgtccgaaattattatttctagtaaaagtgttgataaccaataaatcagttgccttttcatatgaaaaggcttggtttttaccatctccatctttttcccaaaaagaaacaaactgtcctatcttgttaggtgttatttttgcaactctaaatcttaccgattttgaatttaattgaaacatacccgccccatagtctgaattttgagcttcttcctggatagcatttagggttaagcgattaggtttatataaaactttatttacatatgttaacgccttataaaattcattcaatgctttgtttgtactccttatttatcgttgtattgcaacctttttcttatccatcttactcgacccctttcaaaataaagtaaagccaagcaattctgaattatttttatttctttttttgactcttaatttaatccattcttcatcatcagaatatggtttcttggttgttctataccatccgttaaaatgagcaactaactgaatcattattttctcagcttgacctttagagtccatccctaattgtgtaaaaccatttttactacttagcggatctcggtctcctggcttatcaaactgtttaagagctatgtagtatctcctgagtctgtaccaaagagttatagagccaccaaagtgatcccgatagtgattaacattaagttttggtttatagccctttgactttaaatattcggcaatttcttcagcgccaaattcttgacctatttgacctctttctttaagcacattctaaaccccactctgaataaaatgattatttcattactattatactacaattttccatggtcacactaaacaaaaagcagtctattcagatctgctttttattgttttcttcttttaactttttgtttattttgaacccaattaagatattgaaaatagctgctggaagatataaaactcctgcacctattattcctaatgcagtacttgagctcactataaatgtctgcatttctgtgtttcttgacttcaagcaaagtaatactaggaggccagctaaaccccccataagccgtgcaatacctggaataaagaaatctgttaggactccaaataattgccctataattgatagcataatccctaaaaaactggacaataaaactaaatttttaatgtcatttcaccccttttcaaagtatatcatcgggctcgtcatggtcaatcccatatttgcctttgattttctcgttcccacaaccaggattcttttcgactcataacgagctctcactagctgcgctcaatgtttttggtaataataggattttacccaatgataatttcttcccttattttcacaccattcaataaatccctttgattgtttttctgtaaacaacacccagtcatttaacagatcttgataatagttaagtgcttcgttattgttatttcttgtttgttgacattctaccttgttgtttaactgtattgacttaataataagtgctgtatcttctttaatatcgccaaggtacaaatcttcggatatatgatgaaatgaataccaaagtgcgttcaaatttatatcgattagcgttaataaggataattgttcattgctgccaccaagtctaagcgcattgtgtaagtaatcgacacgtttttcagtatttaaaaacacgccataccacctatatggccttggatcttccggattactcttcatccatccctcaagtaaaggctttaaaagttcctcttccaaaggatgaacgagtacatggtgaatatcatctgatgtttcaaataaatcaaatagccaacatgcaaacttctgttgggcattattatcccatatctttgcttcatcaataaaagaagataatgctttaaaggattccttacgtaaccctttttctttgagggagcagaacttttgaaataatggatattcatccaatctgtcacttttcaagatattagttaagatatttaccattgctcacatctctcttcgtttagaatcaagtccatgttatatttagcctttgtaccttgctatatcactaagaataacttgatttccattttcctttttctacacctggatgcatttcaaaatgattttaattgaacttgaaagtgatatgtacaataaactgagttgctatcttcaactataaagtatgtatcttggattaagaaatttgtaaagccaactgttttgagtatcgctttactcctcatgagcatatccatctggatatcattatcagttagaaggtccaaattaatagtaaacgctgtatgtaattcaaagaaagaattatcaaatttaaagtttaagattttcagacaccccccccaccttaccgtttcctttattatacagcgtgatcttatctaattaaaactgctgttttatacagaaaataatgtcctttgttcctttccctctcccgtccattgcagatgctagccacttcatagtttctttaatatagttttaataataaaagcttcatgaaaaaaggtgattttttgcccgcttgaacgccccctcaacatttttaaaaattccatgggcgtttcagtacattctcctttccaagtttttgtttcattgcctaaccattctcccgggtaacgtctttttcagatgacactttaatctctccattctgtgtgaaattgttgtttacttaattagatgccataacaaaaaaagcttcctaacttcagatgctggtacgctttctttcttaatatatgaacataaaacgactacgtgcattctcttgtaaattcaacctttctatatttagaaattttaatattcgaaatttatcctttccctctttacttatatatggaaaaaagtattatttacctaaatgaaaaatagttaaaaacgtagcagaaagaggttattaaatgaaaaagttatttgttacttttcttgtgctaatctccttaaaaagattgcactagtaagtattctctagctaccttgtcaaatgatgactgcaaaacaagctggggactatgtattgtgttcccaagtaaagaagttaaactttattctccaaagagtcctataaaggtagctgtattagatagtgggattaatagctctctgtctatttttgaaaatagttcaataacctcatatgatgctataaaaaacaattccactacaaaagattctttaggccatgatacagccatagcgggtgttattatggctcctttaaataaacaaacagtgcaaggaatatctcctcaagtgaaattattcgatgttaaggttcttaatgataaaggaggtggtgaagtccactctatgaaacaagtaaagtctgaatctgaagaatatgtattttttgagcctattttatgtaaggttaagcataaatttaagactaagcacggtaaactccgcataccttccttcgaatcctggagagtgtaatctctccgttacataactccttagagcctagcttttaaaatccgagtaaaaatttagtacatggatcaattagttgctatcgaataagaactttagtgaattaattgctcatgtcttttataaatttgaattgtccttttttatctaattctaaaaacaaatcaatccgattttgtgaactacttcttcctctaacttcactcattcttcactcatttttgcttgaaacatttcttctgcagatacttcatgagctttagcgatccaataaatatcttttaacagtttttgtgcattattatatgaccagattgtgtatggaaaccgagtttgaattacagcagtttcatcatctggagttgctaccgtatatggtaatgacctgtcaaagatctcagtgtcatagtcataccacaaccagagcatgtcagcagtattatgtatgtaatatcctaagtactctcgttgaaagttcatctgttcactcactgcttttaaatagaataactattttataatctcttcttaataccctccacttaaaatacagtataattgtaacttggatacactaatctatttacatataattacagtgtatttcattaaaaaatcaggagatgattttattgaaaattaaaaaggttattacaagttccctcttattaacgtctttatttatttccgctgctaccgcttatgctacacctgctacctctgttaaaagtcaagatgctatccgaatccaaggagatcaaatggaaatgactgtcgtgagatactacacccaagaagaatcccgtagtatcccttatacgattcaatatgcagagaatggttggtacggaaccttgactgcaactaattggaaacagcaatct

(The sequence listing continues in the following parts.)
